(19) United States
(12) Patent Application Publication
(10) Pub. No.: US 2010/0055783 A1
(43) Pub. Date: Mar. 4, 2010

(54) NUCLEIC ACID COMPOUNDS FOR INHIBITING RAS GENE EXPRESSION AND USES THEREOF

(75) Inventors: Steven C. Quay, Woodinville, WA (US); James McSwiggen, Boulder, CO (US); Narendra K. Vaish, Kirkland, WA (US); Mohammad Ahmadian, Bothell, WA (US)

Correspondence Address: NASTECH PHARMACEUTICAL COMPANY INC;MDRNA, Inc., 3830 MONTE VILLA PARKWAY, BOTHELL, WA, 98021-7266, US

(73) Assignee: MDRNA, INC., Bothell, WA (US)

(21) Appl. No.: 12/529,302

(22) PCT Filed: Mar. 3, 2008
(86) PCT No.: PCT/US2008/055644

§ 371 Date: Aug. 31, 2009

Related U.S. Application Data
(60) Provisional application No. 60/934,940, filed on Mar. 2, 2007.
(60) Provisional application No. 60/934,930, filed on Mar. 16, 2007.
(60) Provisional application No. 60/988,400, filed on Nov. 15, 2007.
(60) Provisional application No. 60/988,401, filed on Nov. 15, 2007.
(60) Provisional application No. 60/988,402, filed on Nov. 15, 2007.

(51) Int. Cl. C12N 5/071; C07H 21/02

(52) U.S. Cl. 435/366; 536/23.1

(57) ABSTRACT

The present disclosure provides meroduplex ribonucleic acid molecules (mdRNA) capable of decreasing or silencing RAS (e.g., HRAS, KRAS, NRAS) gene expression. An mdRNA of this disclosure comprises at least three strands that combine to form at least two non-overlapping double-stranded regions separated by a nick or gap wherein one strand is complementary to an HRAS, KRAS, or NRAS mRNA. In addition, the meroduplex may have at least one uridine is a 5-methyluridine, a nucleoside is a locked nucleic acid, or optionally other modifications, and any combination thereof. Also provided are methods of decreasing expression of a RAS gene in a cell or in a subject to treat a RAS-related disease.

### CROSS-REFERENCE TO RELATED APPLICATIONS

[0001] The present application claims priority to U.S. Patent Application Nos. 60/934,940, filed Mar. 2, 2007; 60/934,930, filed Mar. 16, 2007; 60/988,400, filed November 15; 60/988,401, filed November 15; and 60/988,402, filed Nov. 15, 2007, each of which is incorporated by reference in its entirety.

### TECHNICAL FIELD

[0002] The present disclosure relates generally to compounds for use in treating hyperproliferative or angiogenic disorders by gene silencing and, more specifically, to a nicked or gapped double-stranded RNA (dsRNA) comprising at least three strands that decreases expression of a RAS viral (v-ras) oncogene homolog (RAS) gene, and to uses of such dsRNA to treat or prevent one or more hyperproliferative diseases or disorders, for example, leukemia, melanoma, carcinoma, cancer, tumors, adenoma; as well as one or more angiogenic diseases associated with inappropriate RAS gene expression. The dsRNA that decrease RAS gene expression may optionally have at least one uridine that is a 5-methyluridine.

### BACKGROUND

[0003] RNA interference (RNAi) refers to the cellular process of sequence specific, post-transcriptional gene silencing in animals mediated by small inhibitory nucleic acid molecules, such as a double-stranded RNA (dsRNA) that is homologous to a portion of a targeted messenger RNA (Fire et al., Nature 391:806, 1998; Hamilton et al., Science 286:950, 1999). RNAi has been observed in a variety of organisms, including mammalians (Fire et al., Nature 391:806, 1998; Bahramian and Zarbl, Mol. Cell. Biol. 19:274, 1999; Wianny and Goetz, Nature Cell Biol. 2:70, 1999). RNAi can be induced by introducing an exogenous 21-nucleotide RNA duplex into cultured mammalian cells (Elbashir et al., Nature 411:494, 2001a).

[0004] The mechanism by which dsRNA mediates targeted gene-silencing can be described as involving two steps. The first step involves degradation of long dsRNAs by a ribonuclease III-like enzyme, referred to as Dicer, into short interfering RNAs (siRNAs) having from 21 to 23 nucleotides with double-stranded regions of about 19 base pairs and a two nucleotide, generally, overhang at each 3′-end (Berstein et al., Nature 409:363, 2001; Elbashir et al., Genes Dev. 15: 188, 2001b; and Kim et al., Nature Biotech. 23:222, 2005). The second step of RNAi gene-silencing involves activation of a multi-component nuclease having one strand (guide or antisense strand) from the siRNA and an Argonaute protein to form an RNA-induced silencing complex (“RISC”) (Elbashir et al., Genes Dev. 15:188, 2001). Argonaute initially associates with a double-stranded siRNA and then endonucleolytically cleaves the non-incorporated strand (passenger or sense strand) to facilitate its release due to resulting thermodynamic instability of the cleaved duplex (Leuschner et al., EMBO 7:314, 2006). The guide strand is now able to bind a complementary target mRNA and the activated RISC cleaves the mRNA to promote gene silencing. Cleavage of the target RNA occurs in the middle of the target region that is complementary to the guide strand (Elbashir et al., 2001b).

[0005] The RAS family includes the homologous proteins NRAS, HRAS, and KRAS (Parikh et al., Blood 108:7, 2006). The RAS family members all encode 21-kD guanine nucleotide binding proteins that operate as molecular switches to regulate the transduction of physiological signals from the cell membrane to the nucleus (MacKenzie et al., Blood 93:6, 1999).

[0006] The RAS family members have all been found in several kinds of cancer. HRAS mutations have been shown to be associated with a variety of cancers (Young et al., Oncogene 24:40, 2005; Perkins et al., Mol. Brain Res. 111, 2003; Garrett et al., Cancer Epidemiol. Biomarkers Prev. 2, 1993; Theodorescu et al., Proc. Nat'l. Acad. Sci. USA 87, 1990; Weston et al., Environ Health Perspect. 105:4, 1997; Fujita et al., Cancer Research 48, 1988). KRAS HRAS mutations have been shown to be associated with a variety of cancers (Braun et al., Proc. Nat'l. Acad. Sci. USA 101:2, 2004; Ji et al., J. Biol. Chem. 282:19, 2007; Pao et al., PLoS Medicine 2:1, 2005; Rosell et al., Clin. Cancer Res. 2, 1996; Ryan et al., Gut 52, 2003). In human tumors, activation of NRAS genes has been shown to be a consequence of amino acid substitutions at positions 12, 13, or 61 of an NRAS gene (Carney et al., Proc. Nat'l. Acad. Sci. USA 83, 1986; Janssen et al., Proc. Nat'l. Acad. Sci. USA 84, 1987; Ugurel et al., PLoS ONE 2:2, 2007; MacKenzie et al., Blood 93:6, 1999). Mutations that result in constitutive activation of NRAS have been shown to occur in myeloid malignancies (Parikh et al., 2006; Janssen et al., 1987) and carcinomas (Reynolds et al., Proc. Nat'l. Acad. Sci. USA 88, 1991).

[0007] Several small molecule inhibitors of HRAS have been described (see, e.g., Lerner et al., Oncogene 15:11, 1997; Ochiai et al., Blood 102:9, 2003; Zhu et al., Blood 105:12, 2005; Gana-Weisz et al., Clin. Cancer Res. 8, 2002; Perkins et al., Mol. Brain Res. 111, 2003; Matallanas et al., J. Biol. Chem. 278:7, 2003). Some mutations in KRAS are associated with primary resistance to single-agent gefitinib or erlotinib (Pao et al., PLoS Medicine 2:1, 2005). A variety of inhibitors of NRAS have been described including, for example, small molecules, rationally designed peptides, and antibodies (see e.g., Ugurel et al., 2007; Lerner et al., Oncogene 15:11, 1997; Ochiai et al., Blood 102:9, 2003; Maeda et al., J. Virol. 79:7, 2005; Matallanas et al., J. Biol. Chem. 278:7, 2003).

[0008] There continues to be a need for alternative effective therapeutic modalities useful for treating or preventing RAS-associated diseases or disorders in which reduced RAS gene expression (gene silencing) would be beneficial. The present disclosure meets such needs, and further provides other related advantages.

### BRIEF SUMMARY

[0009] Briefly, the present disclosure provides nicked or gapped double-stranded RNA (dsRNA) comprising at least three strands that is suitable as a substrate for Dicer or as a RISC activator to modify expression of a RAS viral (v-ras) oncogene homolog (RAS) messenger RNA (mRNA).

[0010] In one aspect, the instant disclosure provides a meroduplex mdRNA molecule, comprising a first strand that is complementary to any one of human HRAS mRNA as set forth in SEQ ID NO:1158 or 1159, human KRAS mRNA as set forth in SEQ ID NO:1309 or 1310, or human NRAS mRNA as set forth in SEQ ID NO:2281, and a second strand and a third strand that are each complementary to non-overlapping regions of the first strand, wherein the second strand and third strands can anneal with the first strand to form at least two double-stranded regions spaced apart by up to 10 nucleotides and thereby forming a gap between the second and third strands, and wherein (a) the mdRNA molecule optionally includes at least one double-stranded region comprises from 5 base pairs to 13 base pairs, or (b) the double-stranded regions combined total about 15 base pairs to about 40 base pairs and the mdRNA molecule optionally has blunt ends. In certain embodiments, the first strand is about 15 to about 40 nucleotides in length, and the second and third strands are each, individually, about 5 to about 20 nucleotides, wherein the combined length of the second and third strands is about 15 nucleotides to about 40 nucleotides. In other embodiments, the first strand is about 15 to about 40 nucleotides in length and is complementary to at least about 15, 16, 17, 18, 19, 20, 21, 22, 23, 24, 25, 26, 27, 28, 29, 30, 31, 32, 33, 34, 35, 36, 37, 38, 39, or 40 contiguous nucleotides of any one of human HRAS mRNA as set forth in SEQ ID NO:1158 or 1159, human KRAS mRNA as set forth in SEQ ID NO:1309 or 1310, or human NRAS mRNA as set forth in SEQ ID NO:2281. In still further embodiments, the first strand is about 15 to about 40 nucleotides in length and is at least about 70%, 75%, 80%, 85%, 90%, 91%, 92%, 93%, 94%, 95%, 96%, 97%, 98%, or 99% identical to a sequence that is complementary to at least about 15, 16, 17, 18, 19, 20, 21, 22, 23, 24, 25, 26, 27, 28, 29, 30, 31, 32, 33, 34, 35, 36, 37, 38, 39, or 40 contiguous nucleotides of any one of human HRAS mRNA as set forth in SEQ ID NO:1158 or 1159, human KRAS mRNA as set forth in SEQ ID NO:1309 or 1310, or human NRAS mRNA as set forth in SEQ ID NO:2281.

[0011] In other embodiments, the mdRNA is a RISC activator (e.g., the first strand has about 15 nucleotides to about 25 nucleotides) or a Dicer substrate (e.g., the first strand has about 26 nucleotides to about 40 nucleotides). In some embodiments, the gap comprises at least one to ten unpaired nucleotides in the first strand positioned between the double-stranded regions formed by the second and third strands when annealed to the first strand, or the gap is a nick. In certain embodiments, the nick or gap is located 10 nucleotides from the 5′-end of the first (antisense) strand or at the Argonaute cleavage site. In another embodiment, the meroduplex nick or gap is positioned such that the thermal stability is maximized for the first and second strand duplex and for the first and third strand duplex as compared to the thermal stability of such meroduplexes having a nick or gap in a different position.

[0012] In another aspect, the instant disclosure provides an mdRNA molecule having a first strand that is complementary to any one of human HRAS mRNA as set forth in SEQ ID NO:1158 or 1159, human KRAS mRNA as set forth in SEQ ID NO:1309 or 1310, or human NRAS mRNA as set forth in SEQ ID NO:2281, and a second strand and a third strand that is each complementary to non-overlapping regions of the first strand, wherein the second strand and third strand can anneal with the first strand to form at least two double-stranded regions spaced apart by up to 10 nucleotides and thereby forming a gap between the second and third strands, and wherein (a) the mdRNA molecule optionally includes at least one double-stranded region comprises from 5 base pairs to 13 base pairs, or (b) the double-stranded regions combined total about 15 base pairs to about 40 base pairs and the mdRNA molecule optionally has blunt ends; and wherein at least one pyrimidine of the mdRNA comprises a pyrimidine nucleoside according to Formula I or II:

[chemical structure]

wherein R¹ and R² are each independently a —H, —OH, —OCH₃, —OCH₂OCH₂CH₃, —OCH₂CH₂OCH₃, halogen, substituted or unsubstituted C₁-C₁₀ alkyl, alkoxy, alkoxyalkyl, hydroxyalkyl, carboxyalkyl, alkylsulfonylamino, aminoalkyl, dialkylamino, alkylaminoalkyl, dialkylaminoalkyl, haloalkyl, trifluoromethyl, cycloalkyl, (cycloalkyl)alkyl, substituted or unsubstituted C₂-C₁₀ alkenyl, substituted or unsubstituted —O-allyl, —O—CH₂CH═CH₂, —O—CH═CHCH₃, substituted or unsubstituted C₂-C₁₀ alkynyl, carbamoyl, carbamyl, carboxy, carbonylamino, substituted or unsubstituted aryl, substituted or unsubstituted aralkyl, —NH₂, —NO₂, —C≡N, or heterocyclo group; R³ and R⁴ are each independently a hydroxyl, a protected hydroxyl, a phosphate, or an internucleoside linking group; and R⁵ and R⁸ are independently O or S. In certain embodiments, at least one nucleoside is according to Formula I in which R¹ is methyl and R² is —OH. In certain related embodiments, at least one uridine of the dsRNA molecule is replaced with a nucleoside according to Formula I in which R¹ is methyl and R² is —OH, or R¹ is methyl, R² is —OH, and R⁸ is S. In some embodiments, the at least one R¹ is a C₁-C₅ alkyl, such as methyl. In some embodiments, at least one R² is selected from 2′-O—(C₁-C₅) alkyl, 2′-O-methyl, 2′-OCH₂OCH₂CH₃, 2′-OCH₂CH₂OCH₃, 2′-O-allyl, or fluoro. In some embodiments, at least one pyrimidine nucleoside of the mdRNA molecule is a locked nucleic acid (LNA) in the form of a bicyclic sugar, wherein R² is oxygen, and the 2′-O and 4′-C form an oxymethylene bridge on the same ribose ring (e.g., a 5-methyluridine LNA) or is a G clamp. In other embodiments, one or more of the nucleosides are according to Formula I in which R¹ is methyl and R² is a 2′-O—(C₁-C₅) alkyl, such as 2′-O-methyl. In some embodiments, the gap comprises at least one unpaired nucleotide in the first strand positioned between the double-stranded regions formed by the second and third strands when annealed to the first strand, or the gap is a nick. In certain embodiments, the nick or gap is located 10 nucleotides from the 5′-end of the first strand or at the Argonaute cleavage site. In another embodiment, the meroduplex nick or gap is positioned such that the thermal stability is maximized for the first and second strand duplex and for the first and third strand duplex as compared to the thermal stability of such meroduplexes having a nick or gap in a different position.

[0013] In still another aspect, the instant disclosure provides a method for reducing the expression of a human RAS gene in a cell, comprising administering an mdRNA molecule to a cell expressing a RAS gene, wherein the mdRNA molecule is capable of specifically binding to a RAS mRNA and thereby reducing the gene's level of expression in the cell. In a related aspect, there is provided a method of treating or preventing a disease associated with RAS expression in a subject by administering an mdRNA molecule of this disclosure. In certain embodiments, the cell or subject is human. In certain embodiments, the disease is one or more hyperproliferative diseases or disorders, for example, leukemia, cutaneous melanoma, squamous cell carcinoma, adenocarcinoma, myelodysplastic syndrome, Philadelphia chromosome-negative myeloproliferative disorder, transitional cell carcinoma, ovarian cancer, brain tumors, breast cancer, bladder cancer, lung cancer, kidney tumors, urinary tract tumors, pancreatic carcinoma, and colorectal adenoma; as well as one or more angiogenic diseases or disorders.

[0014] In any of the aspects of this disclosure, some embodiments provide an mdRNA molecule having a 5-methyluridine (ribothymidine), 2-thioribothymidine, or 2′-O-methyl-5-methyluridine in place of at least one uridine on the first, second, or third strand, or in place of each and every uridine on the first, second, or third strand. In further embodiments, the mdRNA further comprises one or more non-standard nucleoside, such as a deoxyuridine, locked nucleic acid (LNA) molecule, or a universal-binding nucleotide, or a G clamp. Exemplary universal-binding nucleotides include C-phenyl, C-naphthyl, inosine, azole carboxamide, 1-β-D-ribofuranosyl-4-nitroindole, 1-β-D-ribofuranosyl-5-nitroindole, 1-β-D-ribofuranosyl-6-nitroindole, or 1-β-D-ribofuranosyl-3-nitropyrrole. In some embodiments, the mdRNA molecule further comprises a 2′-sugar substitution, such as a 2′-O-methyl, 2′-O-methoxyethyl, 2′-O-2-methoxyethyl, 2′-O-allyl, or halogen (e.g., 2′-fluoro). In certain embodiments, the mdRNA molecule further comprises a terminal cap substituent on one or both ends of one or more of the first strand, second strand, or third strand, such as independently an alkyl, abasic, deoxy abasic, glyceryl, dinucleotide, acyclic nucleotide, or inverted deoxynucleotide moiety. In other embodiments, the mdRNA molecule further comprises at least one modified internucleoside linkage, such as independently a phosphorothioate, chiral phosphorothioate, phosphorodithioate, phosphotriester, aminoalkylphosphotriester, methyl phosphonate, alkyl phosphonate, 3′-alkylene phosphonate, 5′-alkylene phosphonate, chiral phosphonate, phosphonoacetate, thiophosphonoacetate, phosphinate, phosphoramidate, 3′-amino phosphoramidate, aminoalkylphosphoramidate, thionophosphoramidate, thionoalkylphosphonate, thionoalkylphosphotriester, selenophosphate, or boranophosphate linkage.

[0015] In any aspect of this disclosure, some embodiments provide an mdRNA comprising an overhang of one to four nucleotides on at least one 3′-end that is not part of the gap, such as at least one deoxynucleotide or two deoxynucleotides (e.g., thymidine). In some embodiments, at least one or two 5′-terminal ribonucleotide of the second strand within the double-stranded region comprises a 2′-sugar substitution. In related embodiments, at least one or two 5′-terminal ribonucleotide of the first strand within the double-stranded region comprises a 2′-sugar substitution. In other related embodiments, at least one or two 5′-terminal ribonucleotide of the second strand and at least one or two 5′-terminal ribonucleotide of the first strand within the double-stranded regions comprise independent 2′-sugar substitutions. In other embodiments, the mdRNA molecule comprises at least three 5-methyluridines within at least one double-stranded region. In some embodiments, the mdRNA molecule has a blunt end at one or both ends. In other embodiments, the 5′-terminal of the third strand is a hydroxyl or a phosphate.

### BRIEF DESCRIPTION OF THE DRAWINGS

[0016] FIG. 1 shows the average gene silencing activity of intact (first bar), nicked (middle bar) and gapped (last bar) dsRNA Dicer substrate specific for each of 22 different targets (AKT, EGFR, FLT1, FRAP1, HIF1A, IL17A, IL18, IL6, MAP2K1, MAPK1, MAPK14, PDGFA, PDGFRA, PIKC3A, PKN3, RAF1, SRD5A1, TNF, TNFSF13B, VEGFA, BCR-ABL [b2a2], and BCR-ABL [b3a2]). Each bar is a graphical representation of an average activity of ten different sequences for each target, which is calculated from the data found in Table 1.

[0017] FIG. 2 shows knockdown activity for RISC activator lacZ dsRNA (21 nucleotide sense strand/21 nucleotide antisense strand; 21/21), Dicer substrate lacZ dsRNA (25 nucleotide sense strand/27 nucleotide antisense strand; 25/27), and meroduplex lacZ mdRNA (13 nucleotide sense strand and 11 nucleotide sense strand/27 nucleotide antisense strand; 13, 11/27—the sense strand is missing one nucleotide so that a single nucleotide gap is left between the 13 nucleotide and 11 nucleotide sense strands when annealed to the 27 nucleotide antisense strand. Knockdown activities were normalized to a Qneg control dsRNA and presented as a normalized value of Qneg (i.e., Qneg represents 100% or “normal” gene expression levels). A smaller value indicates a greater knockdown effect.

[0018] FIG. 3 shows knockdown activity of a RISC activator influenza dsRNA G1498 (21/21) and nicked dsRNA (10, 11/21) at 100 nM. The “wt” designation indicates an unsubstituted RNA molecule; “rT” indicates RNA having each uridine substituted with a ribothymidine; and “p” indicates that the 5′-nucleotide of that strand was phosphorylated. The 21 nucleotide sense and antisense strands of G1498 were individually nicked between the nucleotides 10 and 11 as measured from the 5′-end, and is referred to as 11, 10/21 and 21/10, 11, respectively. The G1498 single stranded 21 nucleotide antisense strand alone (designated AS-only) was used as a control.

[0019] FIG. 4 shows knockdown activity of a lacZ dicer substrate (25/27) having a nick in one of each of positions 8 to 14 and a one nucleotide gap at position 13 of the sense strand (counted from the 5′-end). A dideoxy guanosine (ddG) was incorporated at the 5′-end of the 3′-most strand of the nicked or gapped sense sequence at position 13.

[0020] FIG. 5 shows knockdown activity of a dicer substrate influenza dsRNA G1498DS (25/27) and this sequence nicked at one of each of positions 8 to 14 of the sense strand, and shows the activity of these nicked molecules that are also phosphorylated or have a locked nucleic acid substitution.

[0021] FIG. 6 shows a dose dependent knockdown activity a dicer substrate influenza dsRNA G1498DS (25/27) and this sequence nicked at position 13 of the sense strand.

[0022] FIG. 7 shows knockdown activity of a dicer substrate influenza dsRNA G1498DS having a nick or a gap of one to six nucleotides that begins at any one of positions 8 to 12 of the sense strand.

[0023] FIG. 8 shows knockdown activity of a LacZ RISC dsRNA having a nick or a gap of one to six nucleotides that begins at any one of positions 8 to 14 of the sense strand.

[0024] FIG. 9 shows knockdown activity of an influenza RISC dsRNA having a nick at any one of positions 8 to 14 of the sense strand and further having one or two locked nucleic acids (LNA) per sense strand. The inserts on the right side of the graph provides a graphic depiction of the meroduplex structures (for clarity, a single antisense strand is shown at the bottom of the grouping with each of the different nicked sense strands above the antisense) having different nick positions with the relative positioning of the LNAs on the sense strands.

[0025] FIG. 10 shows knockdown activity of a LacZ dicer substrate dsRNA having a nick at any one of positions 8 to 14 of the sense strand as compared to the same nicked dicer substrates but having a locked nucleic acid substitution.

[0026] FIG. 11 shows the percent knockdown in influenza viral titers using influenza specific mdRNA against influenza strain WSN.

[0027] FIG. 12 shows the in vivo reduction in PR8 influenza viral titers using influenza specific mdRNA as measured by TCID₅₀.

### DETAILED DESCRIPTION

[0028] The instant disclosure is predicated upon the unexpected discovery that a nicked or gapped double-stranded RNA (dsRNA) comprising at least three strands is a suitable substrate for Dicer or RISC and, therefore, may be advantageously employed for gene silencing via, for example, the RNA interference pathway. That is, partially duplexed dsRNA molecules described herein (also referred to as meroduplexes having a nick or gap in at least one strand) are capable of initiating an RNA interference cascade that modifies (e.g. reduces) expression of a target messenger RNA (mRNA), such as a human vascular endothelial growth factor receptor (RAS) mRNA. This is surprising because a person of skill in the art would expect the thermodynamically less stable nicked or gapped dsRNA passenger strand (as compared to an intact dsRNA) to fall apart before any gene silencing effect would result (see, e.g., Leuschner et al., EMBO 7:314, 2006).

[0029] Meroduplex ribonucleic acid (mdRNA) molecules described herein include a first (antisense) strand that is complementary to any one of human HRAS mRNA as set forth in SEQ ID NO:1158 or 1159, human KRAS mRNA as set forth in SEQ ID NO:1309 or 1310, or human NRAS mRNA as set forth in SEQ ID NO:2281, along with second and third strands (together forming a gapped sense strand) that are each complementary to non-overlapping regions of the first strand, wherein the second and third strands can anneal with the first strand to form at least two double-stranded regions separated by a gap, and wherein at least one double-stranded region is optionally from about 5 base pairs to about 15 base pairs, or the combined double-stranded regions total about 5 base pairs to about 40 base pairs and the mdRNA is blunt-ended. The gap can be from 0 nucleotides (i.e., a nick in which only a phosphodiester bond between two nucleotides is broken in a polynucleotide molecule) up to about 10 nucleotides (i.e., the first strand will have at least one unpaired nucleotide). In certain embodiments, the nick or gap is located 10 nucleotides from the 5′-end of the first (antisense) strand or at the Argonaute cleavage site. In another embodiment, the meroduplex nick or gap is positioned such that the thermal stability is maximized for the first and second strand duplex and for the first and third strand duplex as compared to the thermal stability of such meroduplexes having a nick or gap in a different position. Also provided herein are methods of using such dsRNA to reduce expression of a RAS gene in a cell or to treat or prevent diseases or disorders associated with RAS gene expression, including one or more hyperproliferative diseases or disorders, for example, leukemia, cutaneous melanoma, adenocarcinoma, squamous cell carcinoma, Philadelphia chromosome-negative myeloproliferative disorder, myelodysplastic syndrome, transitional cell carcinoma, ovarian cancer, brain tumors, breast cancer, bladder cancer, lung cancer, kidney tumors, urinary tract tumors, pancreatic carcinoma, and colorectal adenoma; as well as one or more angiogenic diseases or disorders.

[0030] Prior to introducing more detail to this disclosure, it may be helpful to an appreciation thereof to provide definitions of certain terms to be used herein.

[0031] In the present description, any concentration range, percentage range, ratio range, or integer range is to be understood to include the value of any integer within the recited range and, when appropriate, fractions thereof (such as one tenth and one hundredth of an integer), unless otherwise indicated. Also, any number range recited herein relating to any physical feature, such as polymer subunits, size or thickness, are to be understood to include any integer within the recited range, unless otherwise indicated. As used herein, “about” or “consisting essentially of” mean±20% of the indicated range, value, or structure, unless otherwise indicated. As used herein, the terms “include” and “comprise” are open ended and are used synonymously. It should be understood that the terms “a” and “an” as used herein refer to “one or more” of the enumerated components. The use of the alternative (e.g., “or”) should be understood to mean either one, both, or any combination thereof of the alternatives.

[0032] As used herein, the term “isolated” means that the referenced material (e.g. nucleic acid molecules of the instant disclosure), is removed from its original environment, such as being separated from some or all of the co-existing materials in a natural environment (e.g., a natural environment may be a cell).

[0033] As used herein, “complementary” refers to a nucleic acid molecule that can form hydrogen bond(s) with another nucleic acid molecule or itself by either traditional Watson-Crick base pairing or other non-traditional types of pairing (e.g., Hoogsteen or reversed Hoogsteen hydrogen bonding) between complementary nucleosides or nucleotides. In reference to the nucleic molecules of the present disclosure, the binding free energy for a nucleic acid molecule with its complementary sequence is sufficient to allow the relevant function of the nucleic acid molecule to proceed, for example, RNAi activity, and there is a sufficient degree of complementarity to avoid non-specific binding of the nucleic acid molecule (e.g., dsRNA) to non-target sequences under conditions in which specific binding is desired, i.e., under physiological conditions in the case of in vivo assays or therapeutic treatment, or under conditions in which the assays are performed in the case of in vitro assays (e.g., hybridization assays). Determination of binding free energies for nucleic acid molecules is well known in the art (see, e.g., Turner et al., CSH Symp. Quant. Biol. LII: 123, 1987; Frier et al., Proc. Nat'l. Acad. Sci. USA 83:9373, 1986; Turner et al., J. Am. Chem. Soc. 109:3783, 1987). Thus, “complementary” or “specifically hybridizable” or “specifically binds” are terms that indicate a sufficient degree of complementarity or precise pairing such that stable and specific binding occurs between a nucleic acid molecule (e.g., dsRNA) and a DNA or RNA target. It is understood in the art that a nucleic acid molecule need not be 100% complementary to a target nucleic acid sequence to be specifically hybridizable or to specifically bind. That is, two or more nucleic acid molecules may be less than fully complementary and is indicated by a percentage of contiguous residues in a nucleic acid molecule that can form hydrogen bonds with a second nucleic acid molecule.

[0034] For example, a first nucleic acid molecule may have 10 nucleotides and a second nucleic acid molecule may have 10 nucleotides, then base pairing of 5, 6, 7, 8, 9, or 10 nucleotides between the first and second nucleic acid molecules, which may or may not form a contiguous double-stranded region, represents 50%, 60%, 70%, 80%, 90%, and 100% complementarity, respectively. In certain embodiments, complementary nucleic acid molecules may have wrongly paired bases—that is, bases that cannot form a traditional Watson-Crick base pair or other non-traditional types of pair (i.e., “mismatched” bases). For instance, complementary nucleic acid molecules may be identified as having a certain number of “mismatches,” such as zero or about 1, about 2, about 3, about 4 or about 5.

[0035] “Perfectly” or “fully” complementary nucleic acid molecules means those in which a certain number of nucleotides of a first nucleic acid molecule hydrogen bond (anneal) with the same number of residues in a second nucleic acid molecule to form a contiguous double-stranded region. For example, two or more fully complementary nucleic acid molecule strands can have the same number of nucleotides (i.e., have the same length and form one double-stranded region, with or without an overhang) or have a different number of nucleotides (e.g., one strand may be shorter than but fully contained within another strand or one strand may overhang the other strand).

[0036] By “ribonucleic acid” or “RNA” is meant a nucleic acid molecule comprising at least one ribonucleotide molecule. As used herein, “ribonucleotide” refers to a nucleotide with a hydroxyl group at the 2′-position of a β-D-ribofuranose moiety. The term RNA includes double-stranded (ds) RNA, single-stranded (ss) RNA, isolated RNA (such as partially purified RNA, essentially pure RNA, synthetic RNA, recombinantly produced RNA), altered RNA (which differs from naturally occurring RNA by the addition, deletion, substitution or alteration of one or more nucleotides), or any combination thereof. For example, such altered RNA can include addition of non-nucleotide material, such as at one or both ends of an RNA molecule, internally at one or more nucleotides of the RNA, or any combination thereof. Nucleotides in RNA molecules of the instant disclosure can also comprise non-standard nucleotides, such as naturally occurring nucleotides, non-naturally occurring nucleotides, chemically-modified nucleotides, deoxynucleotides, or any combination thereof. These altered RNAs may be referred to as analogs or analogs of RNA containing standard nucleotides (i.e., standard nucleotides, as used herein, are considered to be adenine, cytidine, guanidine, thymidine, and uridine).

[0037] The term “dsRNA” as used herein, which is interchangeable with “mdRNA,” refers to any nucleic acid molecule comprising at least one ribonucleotide molecule and capable of inhibiting or down regulating gene expression, for example, by promoting RNA interference (“RNAi”) or gene silencing in a sequence-specific manner. The dsRNAs (mdRNAs) of the instant disclosure may be suitable substrates for Dicer or for association with RISC to mediate gene silencing by RNAi. Examples of dsRNA molecules of this disclosure are provided in the Sequence Listing identified herein. One or both strands of the dsRNA can further comprise a terminal phosphate group, such as a 5′-phosphate or 5′,3′-diphosphate. As used herein, dsRNA molecules, in addition to at least one ribonucleotide, can further include substitutions, chemically-modified nucleotides, and non-nucleotides. In certain embodiments, dsRNA molecules comprise ribonucleotides up to about 100% of the nucleotide positions.

[0038] In addition, as used herein, the term dsRNA is meant to be equivalent to other terms used to describe nucleic acid molecules that are capable of mediating sequence specific RNAi, for example, meroduplex RNA (mdRNA), nicked dsRNA (ndsRNA), gapped dsRNA (gdsRNA), short interfering nucleic acid (siNA), siRNA, micro-RNA (miRNA), short hairpin RNA (shRNA), short interfering oligonucleotide, short interfering substituted oligonucleotide, short interfering modified oligonucleotide, chemically-modified dsRNA, post-transcriptional gene silencing RNA (ptgsRNA), or the like. The term “large double-stranded RNA” (“large dsRNA”) refers to any double-stranded RNA longer than about 40 base pairs (bp) to about 100 bp or more, particularly up to about 300 bp to about 500 bp. The sequence of a large dsRNA may represent a segment of an mRNA or an entire mRNA. A double-stranded structure may be formed by a self-complementary nucleic acid molecule or by annealing of two or more distinct complementary nucleic acid molecule strands.

[0039] In one aspect, a dsRNA comprises two separate oligonucleotides, comprising a first strand (antisense) and a second strand (sense), wherein the antisense and sense strands are self-complementary (i.e., each strand comprises a nucleotide sequence that is complementary to a nucleotide sequence in the other strand and the two separate strands form a duplex or double-stranded structure, for example, wherein the double-stranded region is about 15 to about 24 base pairs or about 26 to about 40 base pairs); the antisense strand comprises a nucleotide sequence that is complementary to a nucleotide sequence in a target nucleic acid molecule or a portion thereof (e.g. a human RAS mRNA of any one of SEQ ID NOS:1158, 1159, 1309, 1310, or 2281); and the sense strand comprises a nucleotide sequence corresponding (i.e., homologous) to the target nucleic acid sequence or a portion thereof (e.g. a sense strand of about 15 to about 25 nucleotides or about 26 to about 40 nucleotides corresponds to the target nucleic acid or a portion thereof).

[0040] In another aspect, the dsRNA is assembled from a single oligonucleotide in which the self-complementary sense and antisense strands of the dsRNA are linked together by a nucleic acid based-linker or a non-nucleic acid-based linker. In certain embodiments, the first (antisense) and second (sense) strands of the dsRNA molecule are covalently linked by a nucleotide or non-nucleotide linker as described herein and known in the art. In other embodiments, a first dsRNA molecule is covalently linked to at least one second dsRNA molecule by a nucleotide or non-nucleotide linker known in the art, wherein the first dsRNA molecule can be linked to a plurality of other dsRNA molecules that can be the same or different, or any combination thereof. In another embodiment, the linked dsRNA may include a third strand that forms a meroduplex with the linked dsRNA.

[0041] In still another aspect, dsRNA molecules described herein form a meroduplex RNA (mdRNA) having three or more strands such as, for example, an ‘A’ (first or antisense) strand, ‘S1’ (second) strand, and ‘S2’ (third) strand in which the ‘S1’ and ‘S2’ strands are complementary to and form base pairs (bp) with non-overlapping regions of the ‘A’ strand (e.g., an mdRNA can have the form of A:S1S2). The double-stranded region formed by the annealing of the ‘S1’ and ‘A’ strands is distinct from and non-overlapping with the double-stranded region formed by the annealing of the ‘S2’ and ‘A’ strands. An mdRNA molecule is a “gapped” molecule, i.e., it contains a “gap” ranging from 0 nucleotides up to about 10 nucleotides (or a gap of 11, 12, 13, 14, 15, 16, 17, 18, 19, 20, 21, 22, 23, 24, 25, 26, 27, 28, 29, 30, 31, 32, 33, 34 or 35 nucleotides). In one embodiment, the A:S1 duplex is separated from the A:S2 duplex by a gap resulting from at least one unpaired nucleotide (up to about 10 unpaired nucleotides) in the ‘A’ strand that is positioned between the A:S1 duplex and the A:S2 duplex and that is distinct from any one or more unpaired nucleotide at the 3′-end of one or more of the ‘A’, ‘S1’, or ‘S2’ strands. In another embodiment, the A:S1 duplex is separated from the A:S2 duplex by a gap of zero nucleotides (i.e., a nick in which only a phosphodiester bond between two nucleotides is broken or missing in the polynucleotide molecule) between the A:S1 duplex and the A:S2 duplex—which can also be referred to as nicked dsRNA (ndsRNA). For example, A:S1S2 may be comprised of a dsRNA having at least two double-stranded regions that combined total about 14 base pairs to about 40 base pairs and the double-stranded regions are separated by a gap of 0, 1, 2, 3, 4, 5, 6, 7, 8, 9, 10, 11, 12, 13, 14, 15, 16, 17, 18, 19, 20, 21, 22, 23, 24, 25, 26, 27, 28, 29, 30, 31, 32, 33, 34 or 35 nucleotides, optionally having blunt ends, or A:S1S2 may comprise a dsRNA having at least two double-stranded regions spaced apart by up to 10 nucleotides and thereby forming a gap between the second and third strands wherein at least one of the double-stranded regions optionally has from 5 base pairs to 13 base pairs.

[0042] A dsRNA or large dsRNA may include a substitution or modification in which the substitution or modification may be in a phosphate backbone bond, a sugar, a base, or a nucleoside. Such nucleoside substitutions can include natural non-standard nucleosides (e.g., 5-methyluridine or 5-methylcytidine or a 2-thioribothymidine), and such backbone, sugar, or nucleoside modifications can include an alkyl or heteroatom substitution or addition, such as a methyl, alkoxyalkyl, halogen, nitrogen or sulfur, or other modifications known in the art.

[0043] In addition, as used herein, the term “RNAi” is meant to be equivalent to other terms used to describe sequence specific RNA interference, such as post transcriptional gene silencing, translational inhibition, or epigenetics. For example, dsRNA molecules of this disclosure can be used to epigenetically silence genes at the post-transcriptional level or the pre-transcriptional level or any combination thereof.

[0044] As used herein, “target nucleic acid” refers to any nucleic acid sequence whose expression or activity is to be altered (e.g., HRAS, KRAS, NRAS). The target nucleic acid can be DNA, RNA, or analogs thereof, and includes single, double, and multi-stranded forms. By “target site” or “target sequence” is meant a sequence within a target nucleic acid (e.g., mRNA) that, when present in an RNA molecule, is “targeted” for cleavage by RNAi and mediated by a dsRNA construct of this disclosure containing a sequence within the antisense strand that is complementary to the target site or sequence.

[0045] As used herein, “off-target effect” or “off-target profile” refers to the observed altered expression pattern of one or more genes in a cell or other biological sample not targeted, directly or indirectly, for gene silencing by an mdRNA or dsRNA. For example, an off-target effect can be quantified by using a DNA microarray to determine how many non-target genes have an expression level altered by about two-fold or more in the presence of a candidate mdRNA or dsRNA, or analog thereof specific for a target sequence, such as an HRAS, KRAS, or NRAS mRNA. A “minimal off-target effect” means that an mdRNA or dsRNA affects expression by about two-fold or more of about 25% to about 1% of the non-target genes examined or it means that the off-target effect of substituted or modified mdRNA or dsRNA (e.g., having at least one uridine substituted with a 5-methyluridine or 2-thioribothymidine and optionally having at least one nucleotide modified at the 2′-position), is reduced by at least about 1% to about 80% or more as compared to the effect on non-target genes of an unsubstituted or unmodified mdRNA or dsRNA.

[0046] By “sense region” or “sense strand” is meant one or more nucleotide sequences of a dsRNA molecule having complementarity to one or more antisense regions of the dsRNA molecule. In addition, the sense region of a dsRNA molecule comprises a nucleic acid sequence having homology or identity to a target sequence, such as HRAS, KRAS, or NRAS. By “antisense region” or “antisense strand” is meant a nucleotide sequence of a dsRNA molecule having complementarity to a target nucleic acid sequence, such as HRAS, KRAS, or NRAS. In addition, the antisense region of a dsRNA molecule can comprise nucleic acid sequence region having complementarity to one or more sense strands of the dsRNA molecule.

[0047] “Analog” as used herein refers to a compound that is structurally similar to a parent compound (e.g., a nucleic acid molecule), but differs slightly in composition (e.g. one atom or functional group is different, added, or removed). The analog may or may not have different chemical or physical properties than the original compound and may or may not have improved biological or chemical activity. For example, the analog may be more hydrophilic or it may have altered activity as compared to a parent compound. The analog may mimic the chemical or biological activity of the parent compound (i.e., it may have similar or identical activity), or, in some cases, may have increased or decreased activity. The analog may be a naturally or non-naturally occurring (e.g., chemically-modified or recombinant) variant of the original compound. An example of an RNA analog is an RNA molecule having a non-standard nucleotide, such as 5-methyuridine or 5-methylcytidine or 2-thioribothymidine, which may impart certain desirable properties (e.g., improve stability, bioavailability, minimize off-target effects or interferon response).

[0048] As used herein, the term “universal base” refers to nucleotide base analogs that form base pairs with each of the standard DNA/RNA bases with little discrimination between them. A universal base is thus interchangeable with all of the standard bases when substituted into a nucleotide duplex (see, e.g., Loakes et al., J. Mol. Bio. 270:426, 1997). Examplary universal bases include C-phenyl, C-naphthyl and other aromatic derivatives, inosine, azole carboxamides, or nitroazole derivatives such as 3-nitropyrrole, 4-nitroindole, 5-nitroindole, and 6-nitroindole (see, e.g. Loakes, Nucleic Acids Res. 29:2437, 2001).

[0049] The term “gene” as used herein, especially in the context of “target gene” or “gene target” for RNAi, means a nucleic acid molecule that encodes an RNA or a transcription product of such gene, including a messenger RNA (mRNA, also referred to as structural genes that encode for a polypeptide), an mRNA splice variant of such gene, a functional RNA (fRNA), or non-coding RNA (ncRNA), such as small temporal RNA (stRNA), microRNA (miRNA), small nuclear RNA (snRNA), short interfering RNA (siRNA), small nucleolar RNA (snRNA), ribosomal RNA (rRNA), transfer RNA (tRNA) and precursor RNAs thereof. Such non-coding RNAs can serve as target nucleic acid molecules for dsRNA mediated RNAi to alter the activity of the target RNA involved in functional or regulatory cellular processes.

[0050] As used herein, “gene silencing” refers to a partial or complete loss-of-function through targeted inhibition of gene expression in a cell, which may also be referred to as RNAi “knockdown,” “inhibition,” “down-regulation,” or “reduction” of expression of a target gene, such as a human HRAS, KRAS, or NRAS gene. Depending on the circumstances and the biological problem to be addressed, it may be preferable to partially reduce gene expression. Alternatively, it might be desirable to reduce gene expression as much as possible. The extent of silencing may be determined by methods described herein and known in the art (see, e.g., PCT Publication No. WO 99/32619; Elbashir et al., EMBO J. 20:6877, 2001). Depending on the assay, quantification of gene expression permits detection of various amounts of inhibition that may be desired in certain embodiments of this disclosure, including prophylactic and therapeutic methods, which will be capable of knocking down target gene expression, in terms of mRNA level or protein level or activity, for example, by equal to or greater than 10%, 30%, 50%, 75% 90%, 95% or 99% of baseline (i.e., normal) or other control levels, including elevated expression levels as may be associated with particular disease states or other conditions targeted for therapy.

[0051] As used herein, the term “therapeutically effective amount” means an amount of dsRNA that is sufficient to result in a decrease in severity of disease symptoms, an increase in frequency or duration of disease symptom-free periods, or a prevention of impairment or disability due to the disease, in the subject (e.g., human) to which it is administered. For example, a therapeutically effective amount of dsRNA directed against an mRNA of RAS (e.g. any one of SEQ ID NOS:1158, 1159, 1309, 1310, or 2281) can inhibit cell growth or hyperproliferative (e.g., neoplastic) cell growth by at least about 20%, at least about 40%, at least about 60%, or at least about 80% relative to untreated subjects. A therapeutically effective amount of a therapeutic compound can decrease, for example, tumor size or otherwise ameliorate symptoms in a subject. One of ordinary skill in the art would be able to determine such therapeutically effective amounts based on such factors as the subject's size, the severity of symptoms, and the particular composition or route of administration selected. The nucleic acid molecules of the instant disclosure, individually, or in combination or in conjunction with other drugs, can be used to treat diseases or conditions discussed herein. For example, to treat a particular disease, disorder, or condition, the dsRNA molecules can be administered to a patient or can be administered to other appropriate cells evident to those skilled in the art, individually or in combination with one or more drugs, under conditions suitable for treatment.

[0052] In addition, one or more dsRNA may be used to knockdown expression of an HRAS mRNA as set forth in SEQ ID NO:1158 or 1159, a KRAS mRNA as set forth in SEQ ID NO:1309 or 1310, or an NRAS mRNA as set forth in SEQ ID NO:2281, or a related mRNA splice variant. In this regard it is noted that a RAS gene may be transcribed into two or more mRNA splice variants; and thus, for example, in certain embodiments, knockdown of one mRNA splice variant without affecting the other mRNA splice variant may be desired, or vice versa; or knockdown of all transcription products may be targeted.

[0053] In addition, it should be understood that the individual compounds, or groups of compounds, derived from the various combinations of the structures and substituents described herein, are disclosed by the present application to the same extent as if each compound or group of compounds was set forth individually. Thus, selection of particular structures or particular substituents is within the scope of the present disclosure. As described herein, all value ranges are inclusive over the indicated range. Thus, a range of C₁-C₄ will be understood to include the values of 1, 2, 3, and 4, such that C₁, C₂, C₃ and C₄ are included.

[0054] The term “alkyl” as used herein refers to saturated straight- or branched-chain aliphatic groups containing from 1-20 carbon atoms, preferably 1-8 carbon atoms and most preferably 1-4 carbon atoms. This definition applies as well to the alkyl portion of alkoxy, alkanoyl and aralkyl groups. The alkyl group may be substituted or unsubstituted. In certain embodiments, the alkyl is a (C₁-C₄) alkyl or methyl.

[0055] The term “cycloalkyl” as used herein refers to a saturated cyclic hydrocarbon ring system containing from 3 to 12 carbon atoms that may be optionally substituted. Exemplary embodiments include, but are not limited to, cyclopropyl, cyclobutyl, cyclopentyl and cyclohexyl. In certain embodiments, the cycloalkyl group is cyclopropyl. In another embodiment, the (cycloalkyl)alkyl groups contain from 3 to 12 carbon atoms in the cyclic portion and 1 to 6 carbon atoms in the alkyl portion. In certain embodiments, the (cycloalkyl)alkyl group is cyclopropylmethyl. The alkyl groups are optionally substituted with from one to three substituents selected from the group consisting of halogen, hydroxy and amino.

[0056] The terms “alkanoyl” and “alkanoyloxy” as used herein refer, respectively, to —C(O)-alkyl groups and —O—C(═O)— alkyl groups, each optionally containing 2 to 10 carbon atoms. Specific embodiments of alkanoyl and alkanoyloxy groups are acetyl and acetoxy, respectively.

[0057] The term “alkenyl” refers to an unsaturated branched, straight-chain or cyclic alkyl group having 2 to 15 carbon atoms and having at least one carbon-carbon double bond derived by the removal of one hydrogen atom from a single carbon atom of a parent alkene. The group may be in either the cis or trans conformation about the double bond(s). Certain embodiments include ethenyl, 1-propenyl, 2-propenyl, 1-methylethenyl, 1-butenyl, 2-butenyl, 3-butenyl, 2-methyl-2-propenyl, 1-pentenyl, 2-pentenyl, 4-pentenyl, 3-methyl-2-butenyl, 1-hexenyl, 2-hexenyl, 1-heptenyl, 2-heptenyl, 1-octenyl, 2-octenyl, 1,3-octadienyl, 2-nonenyl, 1,3-nonadienyl, 2-decenyl, etc., or the like. The alkenyl group may be substituted or unsubstituted.

[0058] The term “alkynyl” as used herein refers to an unsaturated branched, straight-chain, or cyclic alkyl group having 2 to 10 carbon atoms and having at least one carbon-carbon triple bond derived by the removal of one hydrogen atom from a single carbon atom of a parent alkyne. Exemplary alkynyls include ethynyl, 1-propynyl, 2-propynyl, 1-butynyl, 2-butynyl, 3-butynyl, 1-pentynyl, 2-pentynyl, 4-pentynyl, 1-octynyl, 6-methyl-1-heptynyl, 2-decynyl, or the like. The alkynyl group may be substituted or unsubstituted.

[0059] The term “hydroxyalkyl” alone or in combination, refers to an alkyl group as previously defined, wherein one or several hydrogen atoms, preferably one hydrogen atom has been replaced by a hydroxyl group. Examples include hydroxymethyl, hydroxyethyl and 2-hydroxyethyl.

[0060] The term “aminoalkyl” as used herein refers to the group —NRR′, where R and R′ may independently be hydrogen or (C₁-C₄) alkyl.

[0061] The term “alkylaminoalkyl” refers to an alkylamino group linked via an alkyl group (i.e., a group having the general structure -alkyl-NH-alkyl or -alkyl-N(alkyl)(alkyl)). Such groups include, but are not limited to, mono- and di-(C₁-C₈ alkyl)aminoC₁-C₈ alkyl, in which each alkyl may be the same or different.

[0062] The term “dialkylaminoalkyl” refers to alkylamino groups attached to an alkyl group. Examples include, but are not limited to, N,N-dimethylaminomethyl, N,N-dimethylaminoethyl N,N-dimethylaminopropyl, and the like. The term dialkylaminoalkyl also includes groups where the bridging alkyl moiety is optionally substituted.

[0063] The term “haloalkyl” refers to an alkyl group substituted with one or more halo groups, for example chloromethyl, 2-bromoethyl, 3-iodopropyl, trifluoromethyl, perfluoropropyl, 8-chlorononyl, or the like.

[0064] The term “carboxyalkyl” as used herein refers to the substituent —R¹⁰—COOH, wherein R¹⁰ is alkylene; and “carbalkoxyalkyl” refers to —R¹⁰—C(═O)OR¹¹, wherein R¹⁰ and R¹¹ are alkylene and alkyl respectively. In certain embodiments, alkyl refers to a saturated straight- or branched-chain hydrocarbyl radical of 1 to 6 carbon atoms such as methyl, ethyl, n-propyl, isopropyl, n-butyl, t-butyl, n-pentyl, 2-methylpentyl, n-hexyl, and so forth. Alkylene is the same as alkyl except that the group is divalent.

[0065] The term “alkoxy” includes substituted and unsubstituted alkyl, alkenyl, and alkynyl groups covalently linked to an oxygen atom. In one embodiment, the alkoxy group contains 1 to about 10 carbon atoms. Embodiments of alkoxy groups include, but are not limited to, methoxy, ethoxy, isopropyloxy, propoxy, butoxy, and pentoxy groups. Embodiments of substituted alkoxy groups include halogenated alkoxy groups. In a further embodiment, the alkoxy groups can be substituted with groups such as alkenyl, alkynyl, halogen, hydroxyl, alkylcarbonyloxy, arylcarbonyloxy, alkoxycarbonyloxy, aryloxycarbonyloxy, carboxylate, alkylcarbonyl, arylcarbonyl, alkoxycarbonyl, aminocarbonyl, alkylaminocarbonyl, dialkylaminocarbonyl, alkylthiocarbonyl, alkoxyl, phosphate, phosphonato, phosphinato, cyano, amino (including alkylamino, dialkylamino, arylamino, diarylamino, and alkylarylamino), acylamino (including alkylcarbonylamino, arylcarbonylamino, carbamoyl and ureido), amidino, imino, sulfhydryl, alkylthio, arylthio, thiocarboxylate, sulfates, alkylsulfinyl, sulfonato, sulfamoyl, sulfonamido, nitro, trifluoromethyl, cyano, azido, heterocyclyl, alkylaryl, or an aromatic or heteroaromatic moieties. Exemplary halogen substituted alkoxy groups include, but are not limited to, fluoromethoxy, difluoromethoxy, trifluoromethoxy, chloromethoxy, dichloromethoxy, and trichloromethoxy.

[0066] The term “alkoxyalkyl” refers to an alkylene group substituted with an alkoxy group. For example, methoxyethyl (CH₃OCH₂CH₂—) and ethoxymethyl (CH₃CH₂OCH₂—) are both C₃ alkoxyalkyl groups.

[0067] The term “aryl” as used herein refers to monocyclic or bicyclic aromatic hydrocarbon groups having from 6 to 12 carbon atoms in the ring portion, for example, phenyl, naphthyl, biphenyl and diphenyl groups, each of which may be substituted with, for example, one to four substituents such as alkyl; substituted alkyl as defined above, halogen, trifluoromethyl, trifluoromethoxy, hydroxy, alkoxy, cycloalkyloxy, alkanoyl, alkanoyloxy, amino, alkylamino, dialkylamino, nitro, cyano, carboxy, carboxyalkyl, carbamyl, carbamoyl and aryloxy. Specific embodiments of aryl groups in accordance with the present disclosure include phenyl, substituted phenyl, naphthyl, biphenyl, and diphenyl.

[0068] The term “aroyl,” as used alone or in combination herein, refers to an aryl radical derived from an aromatic carboxylic acid, such as optionally substituted benzoic or naphthoic acids.

[0069] The term “aralkyl” as used herein refers to an aryl group bonded to the 2-pyridinyl ring or the 4-pyridinyl ring through an alkyl group, preferably one containing 1 to 10 carbon atoms. A preferred aralkyl group is benzyl.

[0070] The term “carboxy,” as used herein, represents a group of the formula —C(═O)OH or —C(═O)O⁻.

[0071] The term “carbonyl” as used herein refers to a group in which an oxygen atom is double-bonded to a carbon atom —C═O.

[0072] The term “trifluoromethyl” as used herein refers to —CF₃.

[0073] The term “trifluoromethoxy” as used herein refers to —OCF₃.

[0074] The term “hydroxyl” as used herein refers to —OH or —O⁻.

[0075] The term “nitrile” or “cyano” as used herein refers to the group —CN.

[0076] The term “nitro,” as used herein alone or in combination refers to a —NO₂ group.

[0077] The term “amino” as used herein refers to the group —NR⁹R⁹, wherein R⁹ may independently be hydrogen, alkyl, aryl, alkoxy, or heteroaryl. The term “aminoalkyl” as used herein represents a more detailed selection as compared to “amino” and refers to the group —NR′R′, wherein R′ may independently be hydrogen or (C₁-C₄) alkyl. The term “dialkylamino” refers to an amino group having two attached alkyl groups that can be the same or different.

[0078] The term “alkanoylamino” refers to alkyl, alkenyl or alkynyl groups containing the group —C(═O)— followed by —N(H)—, for example acetylamino, propanoylamino and butanoylamino and the like.

[0079] The term “carbonylamino” refers to the group —NR′—CO—CH₂—R′, wherein R′ may be independently selected from hydrogen or (C₁-C₄) alkyl.

[0080] The term “carbamoyl” as used herein refers to —O—C(O)NH₂.

[0081] The term “carbamyl” as used herein refers to a functional group in which a nitrogen atom is directly bonded to a carbonyl, i.e., as in —NR″C(═O)R″ or —C(═O)NR″R″, wherein R″ can be independently hydrogen, alkyl, substituted alkyl, alkenyl, substituted alkenyl, alkoxy, cycloalkyl, aryl, heterocyclo, or heteroaryl.

[0082] The term “alkylsulfonylamino” refers to the group —NHS(O)₂R¹², wherein R¹² is alkyl.

[0083] The term “halogen” as used herein refers to bromine, chlorine, fluorine or iodine. In one embodiment, the halogen is fluorine. In another embodiment, the halogen is chlorine.

[0084] The term “heterocyclo” refers to an optionally substituted, unsaturated, partially saturated, or fully saturated, aromatic or nonaromatic cyclic group that is a 4 to 7 membered monocyclic, or 7 to 11 membered bicyclic ring system that has at least one heteroatom in at least one carbon atom-containing ring. The substituents on the heterocyclo rings may be selected from those given above for the aryl groups. Each ring of the heterocyclo group containing a heteroatom may have 1, 2, or 3 heteroatoms selected from nitrogen, oxygen or sulfur. Plural heteroatoms in a given heterocyclo ring may be the same or different.

[0085] Exemplary monocyclic heterocyclo groups include pyrrolidinyl, pyrrolyl, indolyl, pyrazolyl, imidazolyl, oxazolyl, isoxazolyl, thiazolyl, furyl, tetrahydrofuryl, thienyl, piperidinyl, piperazinyl, azepinyl, pyrimidinyl, pyridazinyl, tetrahydropyranyl, morpholinyl, dioxanyl, triazinyl and triazolyl. Preferred bicyclic heterocyclo groups include benzothiazolyl, benzoxazolyl, benzothienyl, quinolinyl, tetrahydroisoquinolinyl, benzimidazolyl, benzofuryl, indazolyl, benzisothiazolyl, isoindolinyl and tetrahydroquinolinyl. In more detailed embodiments heterocyclo groups may include indolyl, imidazolyl, furyl, thienyl, thiazolyl, pyrrolidyl, pyridyl and pyrimidyl.

[0086] “Substituted” refers to a group in which one or more hydrogen atoms are each independently replaced with the same or different substituent(s). Representative substituents include —X, —R⁶, —O—, ═O, —OR, —SR⁶, —S—, ═S, —NR⁶R⁶, ═NR⁶, —CX₃, —CF₃, —CN, —OCN, —SCN, —NO, —NO₂, ═N₂, —N₃, —S(═O)₂O—, —S(═O)₂OH, —S(═O)₂R⁶, —OS(═O)₂O—, —OS(═O)₂OH, —OS(═O)₂R⁶, —P(═O)(O⁻)₂, —P(═O)(OH)(O⁻), —OP(═O)₂(O⁻), —C(—O)R⁶, —C(═S)R⁶, —C(═O)OR⁶, —C(═O)O⁻, —C(═S)OR⁶, —NR⁶—C(═O)—N(R⁶)₂, —NR⁶—C(═S)—N(R⁶)₂, and —C(═NR⁶)NR⁶R⁶, wherein each X is independently a halogen; and each R⁶ is independently hydrogen, halogen, alkyl, aryl, arylalkyl, arylaryl, arylheteroalkyl, heteroaryl, heteroarylalkyl, NR⁷R⁷, —C(═O)R⁷, and —S(═O)₂R⁷; and each R⁷ is independently hydrogen, alkyl, alkanyl, alkynyl, aryl, arylalkyl, arylheteralkyl, arylaryl, heteroaryl or heteroarylalkyl. Aryl containing substituents, whether or not having one or more substitutions, may be attached in a para (p-), meta (m-) or ortho (o-) conformation, or any combination thereof.

RAS Viral (v-ras) Oncogene Homolog (RAS) and Exemplary dsRNA Molecules

[0087] The product of the v-Ha-ras Harvey rat sarcoma viral oncogene homolog gene (HRAS; also known as RASH1, c-bas/has, HRAS-1, and HRAS-2); the v-Ki-ras2 Kirsten rat sarcoma viral oncogene homolog gene (KRAS; also known as NS3, KRAS, KRAS2, RASK2, KI-RAS, C-K-RAS, K-RAS2A, K-RAS2B, K-RAS4A, and K-RAS4B); and the neuroblastoma RAS viral (v-ras) onclogene homolog (NRAS; also known as N-ras, and NRAS1) is a GTPase protein that responds to a large number of signals and plays a central role in transducing signals that regulate cell proliferation, survival, differentiation, development, growth, fertility, and apoptosis. Mutation or overexpression of HRAS, KRAS, or NRAS that increases activity is associated with a variety of disorders including one or more hyperproliferative diseases or disorders, for example, leukemia, cutaneous melanoma, adenocarcinoma, squamous cell carcinoma, Philadelphia chromosome-negative myeloproliferative disorder, myelodysplastic syndrome, transitional cell carcinoma, ovarian cancer, brain tumors, breast cancer, bladder cancer, lung cancer, kidney tumors, urinary tract tumors, pancreatic carcinoma, and colorectal adenoma; as well as one or more angiogenic diseases or disorders.

[0088] More detail regarding HRAS, KRAS, and NRAS and related diseases or disorders are described at www.ncbi.nlm.nih.gov/entrez/query.fcgi?db=OMIM, which is in the Online Mendelian Inheritance in Man database (OMIM Accession No. 190020, 190070, and 164790, respectively). The complete mRNA sequence for human HRAS, KRAS, and NRAS has Genbank accession numbers NM_{—}005343.2 (SEQ ID NO:1158); NM_{—}176795.2 (SEQ ID NO:1159); NM_{—}033360.2 (SEQ ID NO:1309); NM_{—}004985.3 (SEQ ID NO:1310), and NM_{—}002524.2 (SEQ ID NO:2281); respectively. As used herein, reference to RAS mRNA or RNA sequences or sense strands means an HRAS, KRAS, or NRAS isoform as set forth in any one of SEQ ID NOS: 1158, 1159, 1309, 1310, or 2281, as well as isoforms, variants, and homologs having at least 80% or more identity with human HRAS, KRAS, or NRAS sequence as set forth in SEQ ID NOS:1158, 1159, 1309, 1310, and 2281.

[0089] The “percent identity” between two or more nucleic acid sequences is a function of the number of identical positions shared by the sequences (i.e., % identity=number of identical positions/total number of positions×100), taking into account the number of gaps, and the length of each gap that needs to be introduced to optimize alignment of two or more sequences. The comparison of sequences and determination of percent identity between two or more sequences can be accomplished using a mathematical algorithm, such as BLAST and Gapped BLAST programs at their default parameters (e.g., BLASTN, see www.ncbi.nlm.nih.gov/BLAST; see also Altschul et al., J. Mol. Biol. 215:403-410, 1990).

[0090] In one aspect, the instant disclosure provides an mdRNA molecule, comprising a first strand that is complementary to an HRAS mRNA as set forth in SEQ ID NO:1158 or 1159, a KRAS mRNA as set forth in SEQ ID NO:1309 or 1310, or an NRAS mRNA as set forth in SEQ ID NO:2281, and a second strand and a third strand that are each complementary to non-overlapping regions of the first strand, wherein the second strand and third strands can anneal with the first strand to form at least two double-stranded regions spaced apart by up to 10 nucleotides and thereby forming a gap between the second and third strands, and wherein (a) the mdRNA molecule optionally includes at least one double-stranded region comprises from about 5 base pairs to 13 base pairs, or (b) wherein the combined double-stranded regions total about 15 base pairs to about 40 base pairs and the mdRNA molecule optionally has blunt ends; wherein at least one pyrimidine of the mdRNA is substituted with a pyrimidine nucleoside according to Formula I or II:

[chemical structure]

wherein R¹ and R² are each independently a —H, —OH, —OCH₃, —OCH₂OCH₂CH₃, —OCH₂CH₂OCH₃, halogen, substituted or unsubstituted C₁-C₁₀ alkyl, alkoxy, alkoxyalkyl, hydroxyalkyl, carboxyalkyl, alkylsulfonylamino, aminoalkyl, dialkylamino, alkylaminoalkyl, dialkylaminoalkyl, haloalkyl, trifluoromethyl, cycloalkyl, (cycloalkyl)alkyl, substituted or unsubstituted C₂-C₁₀ alkenyl, substituted or unsubstituted —O-allyl, —O—CH₂CH═CH₂, —O—CH═CHCH₃, substituted or unsubstituted C₂-C₁₀ alkynyl, carbamoyl, carbamyl, carboxy, carbonylamino, substituted or unsubstituted aryl, substituted or unsubstituted aralkyl, —NH₂, —NO₂, —C≡N, or heterocyclo group; R³ and R⁴ are each independently a hydroxyl, a protected hydroxyl, a phosphate, or an internucleoside linking group; and R⁵ and R⁸ are each independently O or S. In certain embodiments, at least one nucleoside is according to Formula I in which R¹ is methyl and R² is —OH, or R¹ is methyl, R² is —OH, and R⁸ is S. In other embodiments, the internucleoside linking group covalently links from about 5 to about 40 nucleosides. In some embodiments, the gap comprises at least one unpaired nucleotide in the first strand positioned between the double-stranded regions formed by the second and third strands when annealed to the first strand, or the gap is a nick. In certain embodiments, the nick or gap is located 10 nucleotides from the 5′-end of the first (antisense) strand or at the Argonaute cleavage site. In another embodiment, the meroduplex nick or gap is positioned such that the thermal stability is maximized for the first and second strand duplex and for the first and third strand duplex as compared to the thermal stability of such meroduplexes having a nick or gap in a different position.

[0091] In still another aspect, the instant disclosure provides an mdRNA molecule, comprising a first strand that is complementary to an HRAS mRNA as set forth in SEQ ID NO:1158 or 1159, a KRAS mRNA as set forth in SEQ ID NO:1309 or 1310, or an NRAS mRNA as set forth in SEQ ID NO:2281, and a second strand and a third strand that are each complementary to non-overlapping regions of the first strand, wherein the second strand and third strands can anneal with the first strand to form at least two double-stranded regions spaced apart by up to 10 nucleotides and thereby forming a gap between the second and third strands, and wherein the mdRNA molecule optionally includes at least one double-stranded region comprises from 5 base pairs to 13 base pairs. In a further aspect, the instant disclosure provides an mdRNA molecule having a first strand that is complementary to an HRAS mRNA as set forth in SEQ ID NO:1158 or 1159, a KRAS mRNA as set forth in SEQ ID NO:1309 or 1310, or an NRAS mRNA as set forth in SEQ ID NO:2281, and a second strand and a third strand that are each complementary to non-overlapping regions of the first strand, wherein the second strand and third strands can anneal with the first strand to form at least two double-stranded regions spaced apart by up to 10 nucleotides and thereby forming a gap between the second and third strands, and wherein the combined double-stranded regions total about 15 base pairs to about 40 base pairs and the mdRNA molecule optionally has blunt ends. In some embodiments, the gap comprises at least one unpaired nucleotide in the first strand positioned between the double-stranded regions formed by the second and third strands when annealed to the first strand, or the gap is a nick. In certain embodiments, the nick or gap is located 10 nucleotides from the 5′-end of the first (antisense) strand or at the Argonaute cleavage site. In another embodiment, the meroduplex nick or gap is positioned such that the thermal stability is maximized for the first and second strand duplex and for the first and third strand duplex as compared to the thermal stability of such meroduplexes having a nick or gap in a different position.

[0092] As provided herein, any of the aspects or embodiments disclosed herein would be useful in treating RAS-associated diseases or disorders, such as one or more hyperproliferative diseases or disorders, for example, leukemia, cutaneous melanoma, adenocarcinoma, squamous cell carcinoma, Philadelphia chromosome-negative myeloproliferative disorder, myelodysplastic syndrome, transitional cell carcinoma, ovarian cancer, brain tumors, breast cancer, bladder cancer, lung cancer, kidney tumors, urinary tract tumors, pancreatic carcinoma, and colorectal adenoma; as well as one or more angiogenic diseases or disorders.

[0093] In some embodiments, the dsRNA comprises at least three strands in which the first strand comprises about 5 nucleotides to about 40 nucleotides, and the second and third strands include each, individually, about 5 nucleotides to about 20 nucleotides, wherein the combined length of the second and third strands is about 15 nucleotides to about 40 nucleotides. In other embodiments, the dsRNA comprises at least two strands in which the first strand comprises about 15 nucleotides to about 24 nucleotides or about 25 nucleotides to about 40 nucleotides. In yet other embodiments, the first strand comprises about 15 to about 24 nucleotides or about 25 nucleotides to about 40 nucleotides and is complementary to at least about 15, 16, 17, 18, 19, 20, 21, 22, 23, 24, 25, 26, 27, 28, 29, 30, 31, 32, 33, 34, 35, 36, 37, 38, 39, or 40 contiguous nucleotides of any one of human HRAS mRNA as set forth in SEQ ID NO:1158 or 1159, human KRAS mRNA as set forth in SEQ ID NO:1309 or 1310, or human NRAS mRNA as set forth in SEQ ID NO:2281. In alternative embodiments, the first strand comprises about 15 to about 24 nucleotides or about 25 nucleotides to about 40 nucleotides and is at least about 70%, 75%, 80%, 85%, 90%, 91%, 92%, 93%, 94%, 95%, 96%, 97%, 98%, or 99% identical to a sequence that is complementary to at least about 15, 16, 17, 18, 19, 20, 21, 22, 23, 24, 25, 26, 27, 28, 29, 30, 31, 32, 33, 34, 35, 36, 37, 38, 39, or 40 contiguous nucleotides of any one of human HRAS mRNA as set forth in SEQ ID NO:1158 or 1159, human KRAS mRNA as set forth in SEQ ID NO:1309 or 1310, or human NRAS mRNA as set forth in SEQ ID NO:2281.

[0094] In further embodiments, the first strand will be complementary to a second strand or a second and third strand or to a plurality of strands. The first strand and its complements will be able to form dsRNA and mdRNA molecules of this disclosure, but only about 19 to about 25 nucleotides of the first strand comprise a sequence complementary to a RAS mRNA. For example, a Dicer substrate dsRNA can have about 25 nucleotides to about 40 nucleotides, but with only 19 nucleotides of the antisense (first) strand being complementary to a RAS mRNA. In further embodiments, the first strand having complementarity to a RAS mRNA in about 19 nucleotides to about 25 nucleotides will have one, two, or three mismatches with a RAS mRNA, such as a sequence set forth in any one of SEQ ID NOS:1158, 1159, 1309, 1310, or 2281, or the first strand of 19 nucleotides to about 25 nucleotides, that for example activates or is capable of loading into RISC, will have at least 80% identity with the corresponding nucleotides found in a RAS mRNA, such as the sequence set forth in any one of SEQ ID NOS:1158, 1159, 1309, 1310, or 2281.

[0095] Certain illustrative dsRNA molecules, which can be used to design mdRNA molecules and can optionally include substitutions or modifications as described herein are provided in the Sequence Listings attached herewith, which is herein incorporated by reference (text file named “07-R075PCT_Sequence Listing,” created Feb. 15, 2008 and having a size of 586 kilobytes). In addition, the content of Table B disclosed in U.S. Provisional Patent Application No. 60/934,930 (filed Mar. 16, 2007), which was submitted with that application as a separate text file named “Table_B_Human_RefSeq_Accession_Numbers.txt” (created Mar. 16, 2007 and having a size of 3,604 kilobytes), is incorporated herein by reference in its entirety.

Substituting and Modifying RAS dsRNA Molecules

[0096] The introduction of substituted and modified nucleotides into mdRNA and dsRNA molecules of this disclosure provides a powerful tool in overcoming potential limitations of in vivo stability and bioavailability inherent to native RNA molecules (i.e., having standard nucleotides) that are exogenously delivered. For example, the use of dsRNA molecules of this disclosure can enable a lower dose of a particular nucleic acid molecule for a given therapeutic effect (e.g. reducing or silencing HRAS, KRAS, or NRAS expression) since dsRNA molecules of this disclosure tend to have a longer half-life in serum. Furthermore, certain substitutions and modifications can improve the bioavailability of dsRNA by targeting particular cells or tissues or improving cellular uptake of the dsRNA molecules. Therefore, even if the activity of a dsRNA molecule of this disclosure is reduced as compared to a native RNA molecule, the overall activity of the substituted or modified dsRNA molecule can be greater than that of the native RNA molecule due to improved stability or delivery of the molecule. Unlike native unmodified dsRNA, substituted and modified dsRNA can also minimize the possibility of activating the interferon response in, for example, humans.

[0097] In certain embodiments, a dsRNA molecule of this disclosure has at least one uridine, at least three uridines, or each and every uridine (i.e., all uridines) of the first (antisense) strand of that is a 5-methyluridine, 2-thioribothymidine, 2′-O-methyl-5-methyluridine, or any combination thereof. In a related embodiment, the dsRNA molecule or analog thereof of this disclosure has at least one uridine, at least three uridines, or each and every uridine of the second (sense) strand of the dsRNA is a 5-methyluridine, 2-thioribothymidine, 2′-O-methyl-5-methyluridine, or any combination thereof. In a related embodiment, the dsRNA molecule of this disclosure has at least one uridine, at least three uridines, or each and every uridine of the third (sense) strand of the dsRNA is a 5-methyluridine, 2-thioribothymidine, 2′-O-methyl-5-methyluridine, or any combination thereof. In still another embodiment, the dsRNA molecule of this disclosure has at least one uridine, at least three uridines, or each and every uridine of both the first (antisense) and second (sense) strands; of both the first (antisense) and third (sense) strands; of both the second (sense) and third (sense) strands; or all of the first (antisense), second (sense) and third (sense) strands of the dsRNA are a 5-methyluridine, 2-thioribothymidine, 2′-O-methyl-5-methyluridine, or any combination thereof. In some embodiments, the double-stranded region of a dsRNA molecule has at least three 5-methyluridines, 2-thioribothymidine, 2′-O-methyl-5-methyluridine, or any combination thereof. In certain embodiments, dsRNA molecules comprise ribonucleotides at about 5% to about 95% of the nucleotide positions in one strand, both strands, or any combination thereof.

[0098] In further embodiments, a dsRNA molecule that decreases expression of a RAS gene by RNAi according to the instant disclosure further comprises one or more natural or synthetic non-standard nucleoside. In related embodiments, the non-standard nucleoside is one or more deoxyuridine, locked nucleic acid (LNA) molecule, a modified base (e.g. 5-methyluridine), a universal-binding nucleotide, a 2′-O-methyl nucleotide, a modified internucleoside linkage (e.g., phosphorothioate), a G clamp, or any combination thereof. In certain embodiments, the universal-binding nucleotide can be C-phenyl, C-naphthyl, inosine, azole carboxamide, 1-β-D-ribofuranosyl-4-nitroindole, 1-β-D-ribofuranosyl-5-nitroindole, 1-β-D-ribofuranosyl-6-nitroindole, or 1-β-D-ribofuranosyl-3-nitropyrrole.

[0099] Substituted or modified nucleotides present in dsRNA molecules, preferably in the sense or antisense strand, but also optionally in both the antisense and sense strands, comprise modified or substituted nucleotides according to this disclosure having properties or characteristics similar to natural or standard ribonucleotides. For example, this disclosure features dsRNA molecules including nucleotides having a Northern conformation (e.g. Northern pseudorotation cycle; see, e.g., Saenger, Principles of Nucleic Acid Structure, Springer-Verlag ed., 1984). As such, chemically modified nucleotides present in dsRNA molecules of this disclosure, preferably in the antisense strand, but also optionally in the sense or both the antisense and sense strands, are resistant to nuclease degradation while at the same time maintaining the capacity to mediate RNAi. Exemplary nucleotides having a Northern configuration include locked nucleic acid (LNA) nucleotides (e.g., 2′-O, 4′-C-methylene-(D-ribofuranosyl) nucleotides), 2′-methoxyethyl (MOE) nucleotides, 2′-methyl-thio-ethyl, 2′-deoxy-2′-fluoro nucleotides, 2′-deoxy-2′-chloro nucleotides, 2′-azido nucleotides, 5-methyluridines, or 2′-O-methyl nucleotides. In certain embodiments, the LNA is a 5-methyluridine LNA or 2-thio-5-methyluridine LNA. In any of these embodiments, one or more substituted or modified nucleotides can be a G clamp (e.g., a cytosine analog that forms an additional hydrogen bond to guanine, such as 9-(aminoethoxy)phenoxazine; see, e.g., Lin and Mateucci, J. Am. Chem. Soc. 120:8531, 1998).

[0100] As described herein, the first and one or more second strands of a dsRNA molecule or analog thereof provided by this disclosure can anneal or hybridize together (i.e., due to complementarity between the strands) to form at least one double-stranded region having a length of about 4 to about 10 base pairs, about 5 to about 13 base pairs, or about 15 to about 40 base pairs. In some embodiments, the dsRNA has at least one double-stranded region ranging in length from about 15 to about 24 base pairs or about 19 to about 23 base pairs. In other embodiments, the dsRNA has at least one double-stranded region ranging in length from about 26 to about 40 base pairs or about 27 to about 30 base pairs or about 30 to about 35 base pairs. In other embodiments, the two or more strands of a dsRNA molecule of this disclosure may optionally be covalently linked together by nucleotide or non-nucleotide linker molecules.

[0101] In certain embodiments, the dsRNA molecule or analog thereof comprises an overhang of one to four nucleotides on one or both 3′-ends of the dsRNA, such as an overhang comprising a deoxyribonucleotide or two deoxyribonucleotides (e.g., thymidine, adenine). In certain embodiments, the 3′-end comprising one or more deoxyribonucleotide is in an mdRNA molecule and is either in the gap, not in the gap, or any combination thereof. In some embodiments, dsRNA molecules or analogs thereof have a blunt end at one or both ends of the dsRNA. In certain embodiments, the 5′-end of the first or second strand is phosphorylated. In any of the embodiments of dsRNA molecules described herein, the 3′-terminal nucleotide overhangs can comprise ribonucleotides or deoxyribonucleotides that are chemically-modified at a nucleic acid sugar, base, or backbone. In any of the embodiments of dsRNA molecules described herein, the 3′-terminal nucleotide overhangs can comprise one or more universal base ribonucleotides. In any of the embodiments of dsRNA molecules described herein, the 3′-terminal nucleotide overhangs can comprise one or more acyclic nucleotides. In any of the embodiments of dsRNA molecules described herein, the dsRNA can further comprise a terminal phosphate group, such as a 5′-phosphate (see Martinez et al., Cell. 110:563-574, 2002; and Schwarz et al., Molec. Cell 10:537-568, 2002) or a 5′,3′-diphosphate.

[0102] As set forth herein, the terminal structure of dsRNAs of this disclosure that decrease expression of a RAS (e.g., HRAS, KRAS, NRAS) gene by, for example, RNAi may either have blunt ends or one or more overhangs. In certain embodiments, the overhang may be at the 3′-end or the 5′-end. The total length of dsRNAs having overhangs is expressed as the sum of the length of the paired double-stranded portion together with the overhanging nucleotides. For example, if a 19 base pair dsRNA has a two nucleotide overhang at both ends, the total length is expressed as 21-mer. Furthermore, since the overhanging sequence may have low specificity to a RAS gene, it is not necessarily complementary (antisense) or identical (sense) to a RAS gene sequence. In further embodiments, a dsRNA of this disclosure that decreases expression of a RAS gene by RNAi may further comprise a low molecular weight structure (e.g. a natural RNA molecule such as a tRNA, rRNA or viral RNA, or an artificial RNA molecule) at, for example, one or more overhanging portion of the dsRNA.

[0103] In further embodiments, a dsRNA molecule that decreases expression of a RAS gene by RNAi according to the instant disclosure further comprises a 2′-sugar substitution, such as 2′-deoxy, 2′-O-methyl, 2′-O-methoxyethyl, 2′-O-2-methoxyethyl, halogen, 2′-fluoro, 2′-O-allyl, or the like, or any combination thereof. In still further embodiments, a dsRNA molecule that decreases expression of a RAS gene by RNAi according to the instant disclosure further comprises a terminal cap substituent on one or both ends of the first strand or one or more second strands, such as an alkyl, abasic, deoxy abasic, glyceryl, dinucleotide, acyclic nucleotide, inverted deoxynucleotide moiety, or any combination thereof. In certain embodiments, at least one or two 5′-terminal ribonucleotides of the sense strand within the double-stranded region have a 2′-sugar substitution. In certain other embodiments, at least one or two 5′-terminal ribonucleotides of the antisense strand within the double-stranded region have a 2′-sugar substitution. In certain embodiments, at least one or two 5′-terminal ribonucleotides of the sense strand and the antisense strand within the double-stranded region have a 2′-sugar substitution.

[0104] In other embodiments, a dsRNA molecule that decreases expression of one or more target gene by RNAi according to the instant disclosure comprises one or more substitutions in the sugar backbone, including any combination of ribosyl, 2′-deoxyribosyl, a tetrofuranosyl (e.g., L-α-threofuranosyl), a hexopyranosyl (e.g., β-allopyranosyl, β-altropyranosyl, and β-glucopyranosyl), a pentopyranosyl (e.g., β-ribopyranosyl, α-lyxopyranosyl, β-xylopyranosyl, and α-arabinopyranosyl), a carbocyclic (carbon only ring) analog, a pyranose, a furanose, a morpholino, or analogs or derivatives thereof.

[0105] In yet other embodiments, a dsRNA molecule that decreases expression of a RAS gene (including a mRNA splice variant thereof) by RNAi according to the instant disclosure further comprises at least one modified internucleoside linkage, such as independently a phosphorothioate, chiral phosphorothioate, phosphorodithioate, phosphotriester, aminoalkylphosphotriester, methyl phosphonate, alkyl phosphonate, 3′-alkylene phosphonate, 5′-alkylene phosphonate, chiral phosphonate, phosphonoacetate, thiophosphonoacetate, phosphinate, phosphoramidate, 3′-amino phosphoramidate, aminoalkylphosphoramidate, thionophosphoramidate, thionoalkylphosphonate, thionoalkylphosphotriester, selenophosphate, boranophosphate linkage, or any combination thereof.

[0106] A modified internucleotide linkage, as described herein, can be present in one or more strands of a dsRNA molecule of this disclosure, for example, in the sense strand, the antisense strand, both strands, or a plurality of strands (e.g., in an mdRNA). The dsRNA molecules of this disclosure can comprise one or more modified internucleotide linkages at the 3′-end, the 5′-end, or both of the 3′- and 5′-ends of the second sense strand, the third sense strand, the antisense strand or any combination of the antisense strand and one or more of the sense strands. In one embodiment, a dsRNA molecule capable of decreasing expression of a RAS gene (including a specific or selected mRNA splice variant thereof) by RNAi has one modified internucleotide linkage at the 3′-end, such as a phosphorothioate linkage. For example, this disclosure provides a dsRNA molecule capable of decreasing expression of a RAS gene by RNAi having about 1 to about 8 or more phosphorothioate internucleotide linkages in one dsRNA strand. In yet another embodiment, this disclosure provides a dsRNA molecule capable of decreasing expression of a RAS gene by RNAi having about 1 to about 8 or more phosphorothioate internucleotide linkages in the dsRNA strands. In other embodiments, an exemplary dsRNA molecule of this disclosure can comprise from about 1 to about 5 or more consecutive phosphorothioate internucleotide linkages at the 5′-end of the sense strand, the antisense strand, both strands, or a plurality of strands. In another example, an exemplary dsRNA molecule of this disclosure can comprise one or more pyrimidine phosphorothioate internucleotide linkages in the sense strand, the antisense strand, either strand, or a plurality of strands. In yet another example, an exemplary dsRNA molecule of this disclosure comprises one or more purine phosphorothioate internucleotide linkages in the sense strand, the antisense strand, either strand, or a plurality of strands.

[0107] Many exemplary modified nucleotide bases or analogs thereof useful in the dsRNA of the instant disclosure include 5-methylcytosine; 5-hydroxymethylcytosine; xanthine; hypoxanthine; 2-aminoadenine; 6-methyl, 2-propyl, or other alkyl derivatives of adenine and guanine; 8-substituted adenines and guanines (such as 8-aza, 8-halo, 8-amino, 8-thiol, 8-thioalkyl, 8-hydroxyl, or the like); 7-methyl, 7-deaza, and 3-deaza adenines and guanines; 2-thiouracil; 2-thiothymine; 2-thiocytosine; 5-methyl, 5-propynyl, 5-halo (such as 5-bromo or 5-fluoro), 5-trifluoromethyl, or other 5-substituted uracils and cytosines; and 6-azouracil. Further useful nucleotide bases can be found in Kurreck, Eur. J. Biochem. 270:1628, 2003; Herdewijn, Antisense Nucleic Acid Develop. 10:297, 2000; Concise Encyclopedia of Polymer Science and Engineering, pages 858-859, Kroschwitz, J. I., ed. John Wiley & Sons, 1990; U.S. Pat. No. 3,687,808, and similar references.

[0108] Certain nucleotide base moieties are particularly useful for increasing the binding affinity of the dsRNA molecules of this disclosure to complementary targets. These include 5-substituted pyrimidines; 6-azapyrimidines; and N-2, N-6, or O-6 substituted purines (including 2-aminopropyladenine, 5-propynyluracil and 5-propynylcytosine). For example, 5-methyluridine and 5-methylcytosine substitutions are known to increase nucleic acid duplex stability, which can be combined with 2′-sugar modifications (such as 2′-methoxy or 2′-methoxyethyl) or internucleoside linkages (e.g. phosphorothioate) that provide nuclease resistance to the modified or substituted dsRNA.

[0109] In another aspect of the instant disclosure, there is provided a dsRNA that decreases expression of a RAS gene, comprising a first strand that is complementary to an HRAS mRNA as set forth in SEQ ID NO:1158 or 1159, a KRAS mRNA as set forth in SEQ ID NO:1309 or 1310, or an NRAS mRNA as set forth in SEQ ID NO:2281, and a second strand that is complementary to the first strand, wherein the first and second strands form a double-stranded region of about 5 to about 40 base pairs; wherein at least one pyrimidine of the dsRNA is a pyrimidine nucleoside according to Formula I or II:

[chemical structure]

wherein R¹ and R² are each independently a —H, —OH, —OCH₃, —OCH₂OCH₂CH₃, —OCH₂CH₂OCH₃, halogen, substituted or unsubstituted C₁-C₁₀ alkyl, alkoxy, alkoxyalkyl, hydroxyalkyl, carboxyalkyl, alkylsulfonylamino, aminoalkyl, dialkylamino, alkylaminoalkyl, dialkylaminoalkyl, haloalkyl, trifluoromethyl, cycloalkyl, (cycloalkyl)alkyl, substituted or unsubstituted C₂-C₁₀ alkenyl, substituted or unsubstituted —O-allyl, —O—CH₂CH═CH₂, —O—CH═CHCH₃, substituted or unsubstituted C₂-C₁₀ alkynyl, carbamoyl, carbamyl, carboxy, carbonylamino, substituted or unsubstituted aryl, substituted or unsubstituted aralkyl, —NH₂, —NO₂, —C≡N, or heterocyclo group; R³ and R⁴ are each independently a hydroxyl, a protected hydroxyl, or an internucleoside linking group; and R⁵ and R⁸ are each independently O or S. In certain embodiments, at least one nucleoside is according to Formula I in which R¹ is methyl and R² is —OH, or R¹ is methyl, R² is —OH, and R⁸ is S. In certain embodiments, at least one nucleoside is according to Formula I in which R¹ is methyl and R² is —O-methyl, or R¹ is methyl, R² is —O-methyl, and R⁸ is O. In other embodiments, the internucleoside linking group covalently links from about 5 to about 40 nucleosides.

[0110] In certain embodiments, the first and one or more second strands of a dsRNA, which decreases expression of a RAS gene by RNAi and has at least one pyrimidine substituted with a pyrimidine nucleoside according to Formula I or II, can anneal or hybridize together (i.e., due to complementarity between the strands) to form at least one double-stranded region having a length or a combined length of about 15 to about 40 base pairs. In some embodiments, the dsRNA has at least one double-stranded region ranging in length from about 4 base pairs to about 10 base pairs or about 5 to about 13 base pairs or about 15 to about 25 base pairs or about 19 to about 23 base pairs. In other embodiments, the dsRNA has at least one double-stranded region ranging in length from about 26 to about 40 base pairs or about 27 to about 30 base pairs or about 30 to about 35 base pairs. In certain embodiments, the dsRNA molecule or analog thereof has an overhang of one to four nucleotides on one or both 3′-ends, such as an overhang comprising a deoxyribonucleotide or two deoxyribonucleotides (e.g. thymidine). In some embodiments, dsRNA molecule or analog thereof has a blunt end at one or both ends of the dsRNA. In certain embodiments, the 5′-end of the first or second strand is phosphorylated.

[0111] In certain embodiments, at least one R¹ is a C₁-C₅ alkyl, such as methyl or ethyl. Within other exemplary embodiments of this disclosure, compounds of Formula I are a 5-alkyluridine (i.e., R¹ is alkyl, R² is —OH, and R³, R⁴, and R⁵ are as defined herein) or compounds of Formula II are a 5-alkylcytidine (i.e., R¹ is alkyl, R² is —OH, and R³, R⁴, and R⁵ are as defined herein). In related embodiments, the 5-alkyluridine is a 5-methyluridine (also referred to as ribothymidine or T^{r}—i.e., R¹ is methyl and R² is —OH), and the 5-alkylcytidine is a 5-methylcytidine. In other embodiments, at least one, at least three, or all uridines of the first strand of the dsRNA are replaced with 5-methyluridine, or at least one, at least three, or all uridines of the second strand of the dsRNA are replaced with 5-methyluridine, or any combination thereof (e.g., such changes are made on more than one strand). In certain embodiments, at least one pyrimidine nucleoside of Formula I or Formula II has an R⁵ that is S or R⁸ that is S.

[0112] In further embodiments, at least one pyrimidine nucleoside of the dsRNA is a locked nucleic acid (LNA) in the form of a bicyclic sugar, wherein R² is oxygen, and the 2′-O and 4′-C form an oxymethylene bridge on the same ribose ring. In a related embodiment, the LNA comprises a base substitution, such as a 5-methyluridine LNA or 2-thio-5-methyluridine LNA. In other embodiments, at least one, at least three, or all uridines of the first strand of the dsRNA are replaced with 5-methyluridine or 2-thioribothymidine or 5-methyluridine LNA or 2-thio-5-methyluridine LNA, or at least one, at least three, or all uridines of the second strand of the dsRNA are replaced with 5-methyluridine, 2-thioribothymidine, 5-methyluridine LNA, 2-thio-5-methyluridine LNA, or any combination thereof (e.g. such changes are made on both strands, or some substitutions include 5-methyluridine only, 2-thioribothymidine only, 5-methyluridine LNA only, 2-thio-5-methyluridine LNA only, or one or more 5-methyluridine or 2-thioribothymidine with one or more 5-methyluridine LNA or 2-thio-5-methyluridine LNA).

[0113] In further embodiments, a ribose of the pyrimidine nucleoside or the internucleoside linkage can be optionally modified. For example, compounds of Formula I or II are provided wherein R² is alkoxy, such as a 2′-O-methyl substitution (e.g., which may be in addition to a 5-alkyluridine or a 5-alkylcytidine, respectively). In certain embodiments, R² is selected from 2′-O—(C₁-C₅) alkyl, 2′-O-methyl, 2′-OCH₂OCH₂CH₃, 2′-OCH₂CH₂OCH₃, 2′-O-allyl, or 2′-fluoro. In further embodiments, one or more of the pyrimidine nucleosides are according to Formula I in which R¹ is methyl and R² is a 2′-O—(C₁-C₅) alkyl (e.g., 2′-O-methyl), or in which R¹ is methyl, R² is a 2′O—(C₁-C₅) alkyl (e.g., 2′O-methyl), and R² is S, or any combination thereof. In other embodiments, one or more, or at least two, pyrimidine nucleosides according to Formula I or II have an R² that is not —H or —OH and is incorporated at a 3′-end or 5′-end and not within the gap of one or more strands within the double-stranded region of the dsRNA molecule.

[0114] In further embodiments, a dsRNA molecule or analog thereof comprising a pyrimidine nucleoside according to Formula I or Formula II in which R² is not —H or —OH and an overhang, further comprises at least two of pyrimidine nucleosides that are incorporated either at a 3′-end or a 5′-end or both of one strand or two strands within the double-stranded region of the dsRNA molecule. In a related embodiment, at least one of the at least two pyrimidine nucleosides in which R² is not —H or —OH is located at a 3′-end or a 5′-end within the double-stranded region of at least one strand of the dsRNA molecule, and wherein at least one of the at least two pyrimidine nucleosides in which R² is not —H or —OH is located internally within a strand of the dsRNA molecule. In still further embodiments, a dsRNA molecule or analog thereof that has an overhang has a first of the two or more pyrimidine nucleosides in which R² is not —H or —OH that is incorporated at a 5′-end within the double-stranded region of the sense strand of the dsRNA molecule and a second of the two or more pyrimidine nucleosides is incorporated at a 5′-end within the double-stranded region of the antisense strand of the dsRNA molecule. In any of these embodiments, one or more substituted or modified nucleotides can be a G clamp (e.g., a cytosine analog that forms an additional hydrogen bond to guanine, such as 9-(aminoethoxy)phenoxazine; see, e.g. Lin and Mateucci, 1998). In any of these embodiments, provided the one or more modified pyrimidine nucleosides are not within the mdRNA molecule gap.

[0115] In yet other embodiments, a dsRNA molecule or analog thereof of Formula I or II according to the instant disclosure that has an overhang that comprises four or more independent pyrimidine nucleosides or four or more independent pyrimidine nucleosides in which R² is not —H or —OH, wherein (a) a first pyrimidine nucleoside is incorporated into a 3′-end within the double-stranded region of the sense (second) strand of the dsRNA, (b) a second pyrimidine nucleoside is incorporated into a 5′-end within the double-stranded region of the sense (second) strand, (c) a third pyrimidine nucleoside is incorporated into a 3′-end within the double-stranded region of the antisense (first) strand of the dsRNA, and (d) a fourth pyrimidine nucleoside is incorporated into a 5′-end within the double-stranded region of the antisense (first) strand. In any of these embodiments, provided the one or more modified pyrimidine nucleosides are not within the gap.

[0116] In further embodiments, a dsRNA molecule or analog thereof comprising a pyrimidine nucleoside according to Formula I or Formula II in which R² is not —H or —OH and is blunt-ended, further comprises at least two of pyrimidine nucleosides that are incorporated either at a 3′-end or a 5′-end or both of one strand or two strands of the dsRNA molecule. In a related embodiment, at least one of the at least two pyrimidine nucleosides in which R² is not —H or —OH is located at a 3′-end or a 5′-end of at least one strand of the dsRNA molecule, and wherein at least one of the at least two pyrimidine nucleosides in which R² is not —H or —OH is located internally within a strand of the dsRNA molecule. In still further embodiments, a dsRNA molecule or analog thereof that is blunt-ended has a first of the two or more pyrimidine nucleosides in which R² is not —H or —OH that is incorporated at a 5′-end of the sense strand of the dsRNA molecule and a second of the two or more pyrimidine nucleosides is incorporated at a 5′-end of the antisense strand of the dsRNA molecule. In any of these embodiments, provided the one or more modified pyrimidine nucleosides are not within the gap.

[0117] In yet other embodiments, a dsRNA molecule comprising a pyrimidine nucleoside according to Formula I or Formula II and that is blunt-ended comprises four or more independent pyrimidine nucleosides or four or more independent pyrimidine nucleosides in which R² is not —H or —OH, wherein (a) a first pyrimidine nucleoside is incorporated into a 3′-end within the double-stranded region of the sense (second) strand of the dsRNA, (b) a second pyrimidine nucleoside is incorporated into a 5′-end within the double-stranded region of the sense (second) strand, (c) a third pyrimidine nucleoside is incorporated into a 3′-end within the double-stranded region of the antisense (first) strand of the dsRNA, and (d) a fourth pyrimidine nucleoside is incorporated into a 5′-end within the double-stranded region of the antisense (first) strand. In any of these embodiments, provided the one or more modified pyrimidine nucleosides are not within the gap.

[0118] In still further embodiments, a dsRNA molecule or analog thereof of Formula I or II according to the instant disclosure further comprises a terminal cap substituent on one or both ends of the first strand or second strand, such as an alkyl, abasic, deoxy abasic, glyceryl, dinucleotide, acyclic nucleotide, inverted deoxynucleotide moiety, or any combination thereof. In further embodiments, one or more internucleoside linkage can be optionally modified. For example, a dsRNA molecule or analog thereof of Formula I or II according to the instant disclosure wherein at least one internucleoside linkage is modified to a phosphorothioate, chiral phosphorothioate, phosphorodithioate, phosphotriester, aminoalkylphosphotriester, methyl phosphonate, alkyl phosphonate, 3′-alkylene phosphonate, 5′-alkylene phosphonate, chiral phosphonate, phosphonoacetate, thiophosphonoacetate, phosphinate, phosphoramidate, 3′-amino phosphoramidate, aminoalkylphosphoramidate, selenophosphate, thionophosphoramidate, thionoalkylphosphonate, thionoalkylphosphotriester, boranophosphate linkage, or any combination thereof.

[0119] In still another embodiment, a nicked or gapped dsRNA molecule (ndsRNA or gdsRNA, respectively) that decreases expression of a RAS gene by RNAi, comprising a first strand that is complementary to an HRAS mRNA as set forth in SEQ ID NO:1158 or 1159, a KRAS mRNA asset forth in SEQ ID NO:1309 or 1310, or an NRAS mRNA as set forth in SEQ ID NO:2281, and two or more second strands that are complementary to the first strand, wherein the first and at least one of the second strands form a non-overlapping double-stranded region of about 5 to about 13 base pairs. Any of the substitutions or modifications described herein is contemplated within this embodiment as well.

[0120] In another exemplary of this disclosure, the dsRNAs comprise at least two or more substituted pyrimidine nucleosides can each be independently selected wherein R¹ comprises any chemical modification or substitution as contemplated herein, for example an alkyl (e.g. methyl), halogen, hydroxy, alkoxy, nitro, amino, trifluoromethyl, cycloalkyl, (cycloalkyl)alkyl, alkanoyl, alkanoyloxy, aryl, aroyl, aralkyl, nitrile, dialkylamino, alkenyl, alkynyl, hydroxyalkyl, aminoalkyl, alkylaminoalkyl, dialkylaminoalkyl, haloalkyl, carboxyalkyl, alkoxyalkyl, carboxy, carbonyl, alkanoylamino, carbamoyl, carbonylamino, alkylsulfonylamino, or heterocyclo group. When two or more modified ribonucleotides are present, each modified ribonucleotide can be independently modified to have the same or different modification or substitution at R¹ or R².

[0121] In other detailed embodiments, one or more substituted pyrimidine nucleosides according to Formula I or II can be located at any ribonucleotide position, or any combination of ribonucleotide positions, on either or both of the sense and antisense strands of a dsRNA molecule of this disclosure, including at one or more multiple terminal positions as noted above, or at any one or combination of multiple non-terminal (“internal”) positions. In this regard, each of the sense and antisense strands can incorporate about 1 to about 6 or more of the substituted pyrimidine nucleosides.

[0122] In certain embodiments, when two or more substituted pyrimidine nucleosides are incorporated within a dsRNA of this disclosure, at least one of the substituted pyrimidine nucleosides will be at a 3′- or 5′-end of one or both strands, and in certain embodiments at least one of the substituted pyrimidine nucleosides will be at a 5′-end of one or both strands. In other embodiments, the substituted pyrimidine nucleosides are located at a position corresponding to a position of a pyrimidine in an unmodified dsRNA that is constructed as a homologous sequence for targeting a cognate mRNA, as described herein.

[0123] In addition, the terminal structure of the dsRNAs of this disclosure may have a stem-loop structure in which ends of one side of the dsRNA molecule are connected by a linker nucleic acid, e.g., a linker RNA. The length of the double-stranded region (stem-loop portion) can be, for example, about 15 to about 49 bp, about 15 to about 35 bp, or about 21 to about 30 bp long. Alternatively, the length of the double-stranded region that is a final transcription product of dsRNAs to be expressed in a target cell may be, for example, approximately about 15 to about 49 bp, about 15 to about 35 bp, or about 21 to about 30 bp long. When linker segments are employed, there is no particular limitation in the length of the linker as long as it does not hinder pairing of the stem portion. For example, for stable pairing of the stem portion and suppression of recombination between DNAs coding for this portion, the linker portion may have a clover-leaf tRNA structure. Even if the linker has a length that would hinder pairing of the stem portion, it is possible, for example, to construct the linker portion to include introns so that the introns are excised during processing of a precursor RNA into mature RNA, thereby allowing pairing of the stem portion. In the case of a stem-loop dsRNA, either end (head or tail) of RNA with no loop structure may have a low molecular weight RNA. As described above, these low molecular weight RNAs may include a natural RNA molecule, such as tRNA, rRNA or viral RNA, or an artificial RNA molecule.

[0124] A dsRNA molecule may be comprised of a circular nucleic acid molecule, wherein the dsRNA is about 38 to about 70 nucleotides in length having from about 18 to about 23 base pairs (e.g., about 19 to about 21 bp) wherein the circular oligonucleotide forms a dumbbell shaped structure having about 19 base pairs and two loops. In certain embodiments, a circular dsRNA molecule contains two loop motifs wherein one or both loop portions of the dsRNA molecule is biodegradable. For example, a circular dsRNA molecule of this disclosure is designed such that degradation of the loop portions of the dsRNA molecule in vivo can generate a dsRNA molecule with 3′-terminal overhangs, such as 3′-terminal nucleotide overhangs comprising from about 1 to about 4 (unpaired) nucleotides.

[0125] Substituting or modifying nucleosides of a dsRNA according to this disclosure can result in increased resistance to enzymatic degradation, such as exonucleolytic degradation, including 5′-exonucleolytic or 3′-exonucleolytic degradation. As such, in some embodiments, the dsRNAs described herein will exhibit significant resistance to enzymatic degradation compared to a corresponding dsRNA having standard nucleotides, and will thereby possess greater stability, increased half-life, and greater bioavailability in physiological environments (e.g., when introduced into a eukaryotic target cell). In addition to increasing resistance of the substituted or modified dsRNAs to exonucleolytic degradation, the incorporation of one or more pyrimidine nucleosides according to Formula I or II will render dsRNAs more resistant to other enzymatic or chemical degradation processes and thus more stable and bioavailable than otherwise identical dsRNAs that do not include the substitutions or modifications. In related aspects of this disclosure, dsRNA substitutions or modifications described herein will often improve stability of a modified dsRNA for use within research, diagnostic and treatment methods wherein the modified dsRNA is contacted with a biological sample, for example, a mammalian cell, intracellular compartment, serum or other extracellular fluid, tissue, or other in vitro or in vivo physiological compartment or environment. In one embodiment, diagnosis is performed on an isolated biological sample. In another embodiment, the diagnostic method is performed in vitro. In a further embodiment, the diagnostic method is not performed (directly) on a human or animal body.

[0126] In addition to increasing stability of substituted or modified dsRNAs, incorporation of one or more pyrimidine nucleosides according to Formula I or II in a dsRNA designed for gene silencing can provide additional desired functional results, including increasing a melting point of a substituted or modified dsRNA compared to a corresponding unmodified dsRNA. In another aspect of this disclosure, certain substitutions or modifications of dsRNAs described herein can reduce “off-target effects” of the substituted or modified dsRNA molecules when they are contacted with a biological sample (e.g., when introduced into a target eukaryotic cell having specific, and non-specific mRNA species present as potential specific and non-specific targets). In yet another aspect of this disclosure, the dsRNA substitutions or modifications described herein can reduce interferon activation by the dsRNA molecule when the dsRNA is contacted with a biological sample, e.g., when introduced into a eukaryotic cell.

[0127] In further embodiments, dsRNAs of this disclosure can comprise one or more sense (second) strand that is homologous or corresponds to a sequence of a target gene (e.g. an HRAS, KRAS, or NRAS) and an antisense (first) strand that is complementary to the sense strand and a sequence of the target gene (e.g., an HRAS, KRAS, or NRAS). In exemplary embodiments, at least one strand of the dsRNA incorporates one or more pyrimidines substituted according to Formula I or II (e.g., wherein the pyrimidine is a 5-methyluridine, 2-thioribothymidine, or 2-O-methyl-5-methylurindine, the ribose is modified to incorporate one or more 2′-O-methyl substitutions, or any combination thereof). These and other multiple substitutions or modifications according to Formula I or II can be introduced into one or more pyrimidines, or into any combination and up to all pyrimidines present in one or more strands of a dsRNA of the instant disclosure, so long as the dsRNA has or retains RNAi activity similar to or better than the activity of an unmodified dsRNA. In one embodiment, the dsRNA comprises one or more 2′-O-methyl-5-methyluridine.

[0128] In any of the embodiments described herein, the dsRNA may include multiple modifications. For example, a dsRNA having at least one ribothymidine or 2′-O-methyl-5-methyluridine may further comprise at least one LNA, 2′-methoxy, 2′-fluoro, 2′-deoxy, phosphorothioate linkage, an inverted base terminal cap, or any combination thereof. In certain embodiments, a dsRNA will have from one to all ribothymidines and have up to 75% LNA. In other embodiments, a dsRNA will have from one to all ribothymidines and have up to 75% 2′-methoxy (e.g., not at the Argonaute cleavage site). In still other embodiments, a dsRNA will have from one to all ribothymidines and have up to 100% 2′-fluoro. In further embodiments, a dsRNA will have from one to all ribothymidines and have up to 75% 2′-deoxy. In further embodiments, a dsRNA will have up to 75% LNA and have up to 75% 2′-methoxy. In still other embodiments, a dsRNA will have up to 75% LNA and have up to 100% 2′-fluoro. In further embodiments, a dsRNA will have up to 75% LNA and have up to 75% 2′-deoxy. In other embodiments, a dsRNA will have up to 75% 2′-methoxy and have up to 100% 2′-fluoro. In more embodiments, a dsRNA will have up to 75% 2′-methoxy and have up to 75% 2′-deoxy. In further embodiments, a dsRNA will have up to 100% 2′-fluoro and have up to 75% 2′-deoxy.

[0129] In further multiple modification embodiments, a dsRNA will have from one to all ribothymidines, up to 75% LNA, and up to 75% 2′-methoxy. In still further embodiments, a dsRNA will have from one to all ribothymidines, up to 75% LNA, and up to 100% 2′-fluoro. In further embodiments, a dsRNA will have from one to all ribothymidines, up to 75% LNA, and up to about 75% 2′-deoxy. In further embodiments, a dsRNA will have from one to all ribothymidines, up to 75% 2′-methoxy, and up to 75% 2′-fluoro. In further embodiments, a dsRNA will have from one to all ribothymidines, up to 75% 2′-methoxy, and up to 75% 2′-deoxy. In further embodiments, a dsRNA will have from one to all ribothymidines, up to 100% 2′-fluoro, and up to 75% 2′-deoxy. In yet further embodiments, a dsRNA will have from one to all ribothymidines, up to 75% LNA substitutions, up to 75% 2′-methoxy, up to 100% 2′-fluoro, and up to 75% 2′-deoxy. In other embodiments, a dsRNA will have up to 75% LNA, up to 75% 2′-methoxy, and up to 100% 2′-fluoro. In further embodiments, a dsRNA will have up to 75% LNA, up to 75% 2′-methoxy, and up to about 75% 2′-deoxy. In further embodiments, a dsRNA will have up to 75% LNA, up to 100% 2′-fluoro, and up to 75% 2′-deoxy. In still further embodiments, a dsRNA will have up to 75% 2′-methoxy, up to 100% 2′-fluoro, and up to 75% 2′-deoxy.

[0130] In any of these exemplary methods for using multiply modified dsRNA, the dsRNA may further comprise up to 100% phosphorothioate internucleoside linkages, from one to ten or more inverted base terminal caps, or any combination thereof. Additionally, any of these dsRNA may have these multiple modifications on one strand, two strands, three strands, a plurality of strands, or all strands, or on the same or different nucleoside within a dsRNA molecule. Finally, in any of these multiple modification dsRNA, the dsRNA must have gene silencing activity.

[0131] Within certain aspects, the present disclosure provides dsRNA that decreases expression of a RAS gene by RNAi (e.g. a RAS of any one of SEQ ID NOS:1158, 1159, 1309, 1310, or 2281), and compositions comprising one or more dsRNA, wherein at least one dsRNA comprises one or more universal-binding nucleotide(s) in the first, second or third position in the anti-codon of the antisense or sense strand of the dsRNA and wherein the dsRNA is capable of specifically binding to a RAS sequence, such as an RNA expressed by a target cell. In cases wherein the sequence of a target RAS RNA includes one or more single nucleotide substitutions, dsRNA comprising a universal-binding nucleotide retains its capacity to specifically bind a target RAS RNA, thereby mediating gene silencing and, as a consequence, overcoming escape of the target RAS from dsRNA-mediated gene silencing. Examplary universal-binding nucleotides that may be suitably employed in the compositions and methods disclosed herein include inosine, 1-β-D-ribofuranosyl-5-nitroindole, or 1-β-D-ribofuranosyl-3-nitropyrrole.

[0132] In certain aspects, dsRNA disclosed herein can include between about 1 universal-binding nucleotide and about 10 universal-binding nucleotides. Within other aspects, the presently disclosed dsRNA may comprise a sense strand that is homologous to a sequence of a RAS gene and an antisense strand that is complementary to the sense strand, with the proviso that at least one nucleotide of the antisense or sense strand of the otherwise complementary dsRNA duplex has one or more universal-binding nucleotide.

### Synthesis of Nucleic Acid Molecules

[0133] Exemplary molecules of the instant disclosure are recombinantly produced, chemically synthesized, or a combination thereof. Oligonucleotides (e.g., certain modified oligonucleotides or portions of oligonucleotides lacking ribonucleotides) are synthesized using protocols known in the art, for example as described in Caruthers et al., Methods in Enzymol. 211:3-19, 1992; Thompson et al., PCT Publication No. WO 99/54459, Wincott et al., Nucleic Acids Res. 23:2677-2684, 1995; Wincott et al., Methods Mol. Bio. 74:59, 1997; Brennan et al., Biotechnol Bioeng. 61:33-45, 1998; and Brennan, U.S. Pat. No. 6,001,311. Synthesis of RNA, including certain dsRNA molecules and analogs thereof of this disclosure, can be made using the procedure as described in Usman et al., J. Am. Chem. Soc. 109:7845, 1987; Scaringe et al., Nucleic Acids Res. 18:5433, 1990; and Wincott et al., Nucleic Acids Res. 23:2677-2684, 1995; Wincott et al., Methods Mol. Bio. 74:59, 1997.

[0134] In certain embodiments, the nucleic acid molecules of the present disclosure can be synthesized separately and joined together post-synthetically, for example, by ligation (Moore et al., Science 256:9923, 1992; Draper et al., PCT Publication No. WO 93/23569; Shabarova et al., Nucleic Acids Res. 19:4247, 1991; Bellon et al., Nucleosides & Nucleotides 16:951, 1997; Bellon et al., Bioconjugate Chem. 8:204, 1997), or by hybridization following synthesis or deprotection.

[0135] In further embodiments, dsRNAs of this disclosure that decrease expression of a RAS gene by RNAi can be made as single or multiple transcription products expressed by a polynucleotide vector encoding one or more dsRNAs and directing their expression within host cells. In these embodiments the double-stranded portion of a final transcription product of the dsRNAs to be expressed within the target cell can be, for example, about 5 to about 40 bp, about 15 to about 24 bp, or about 25 to about 40 bp long. Within exemplary embodiments, double-stranded portions of dsRNAs, in which two or more strands pair up, are not limited to completely paired nucleotide segments, and may contain non-pairing portions due to a mismatch (the corresponding nucleotides are not complementary), bulge (lacking in the corresponding complementary nucleotide on one strand), overhang, or the like. Non-pairing portions can be contained to the extent that they do not interfere with dsRNA formation and function. In certain embodiments, a “bulge” may comprise 1 to 2 non-pairing nucleotides, and the double-stranded region of dsRNAs in which two strands pair up may contain from about 1 to 7, or about 1 to 5 bulges. In addition, “mismatch” portions contained in the double-stranded region of dsRNAs may include from about 1 to 7, or about 1 to 5 mismatches. In other embodiments, the double-stranded region of dsRNAs of this disclosure may contain both bulge and mismatched portions in the approximate numerical ranges specified herein.

[0136] A dsRNA or analog thereof of this disclosure may be further comprised of a nucleotide, non-nucleotide, or mixed nucleotide/non-nucleotide linker that joins the sense region of the dsRNA to the antisense region of the dsRNA. In one embodiment, a nucleotide linker can be a linker of more than about 2 nucleotides length up to about 10 nucleotides in length. In another embodiment, the nucleotide linker can be a nucleic acid aptamer. By “aptamer” or “nucleic acid aptamer” as used herein is meant a nucleic acid molecule that binds specifically to a target molecule wherein the nucleic acid molecule has sequence that comprises a sequence recognized by the target molecule in its natural setting. Alternately, an aptamer can be a nucleic acid molecule that binds to a target molecule wherein the target molecule does not naturally bind to a nucleic acid. The target molecule can be any molecule of interest. For example, the aptamer can be used to bind to a ligand-binding domain of a protein, thereby preventing interaction of the naturally occurring ligand with the protein. This is a non-limiting example and those in the art will recognize that other embodiments can be readily generated using techniques generally known in the art (see, e.g. Gold et al., Annu. Rev. Biochem. 64:763, 1995; Brody and Gold, J. Biotechnol. 74:5, 2000; Sun, Curr. Opin. Mol. Ther. 2:100, 2000; Kusser, J. Biotechnol. 74:27, 2000; Hermann and Patel, Science 287:820, 2000; and Jayasena, Clinical Chem. 45:1628, 1999).

[0137] A non-nucleotide linker may be comprised of an abasic nucleotide, polyether, polyamine, polyamide, peptide, carbohydrate, lipid, polyhydrocarbon, or other polymeric compounds (e.g. polyethylene glycols such as those having between 2 and 100 ethylene glycol units). Specific examples include those described by Seela and Kaiser, Nucleic Acids Res. 18:6353, 1990, and Nucleic Acids Res. 15:3113, 1987; Cload and Schepartz, J. Am. Chem. Soc. 113:6324, 1991; Richardson and Schepartz, J. Am. Chem. Soc. 113:5109, 1991; Ma et al., Nucleic Acids Res. 21:2585, 1993, and Biochemistry 32:1751, 1993; Durand et al., Nucleic Acids Res. 18:6353, 1990; McCurdy et al., Nucleosides & Nucleotides 10:287, 1991; Jaschke et al., Tetrahedron Lett. 34:301, 1993; Ono et al., Biochemistry 30:9914, 1991; Arnold et al., PCT Publication No. WO 89/02439; Usman et al., PCT Publication No. WO 95/06731; Dudycz et al., PCT Publication No. WO 95/11910 and Ferentz and Verdine, J. Am. Chem. Soc. 113:4000, 1991. The synthesis of a dsRNA molecule of this disclosure, which can be further modified, comprises: (a) synthesis of a first (antisense) strand and synthesis of a second (sense) strand and a third (sense) strand that are each complementary to non-overlapping regions of the first strand; and (b) annealing the first, second and third strands together under conditions suitable to obtain a dsRNA molecule. In another embodiment, synthesis of the first, second and third strands of a dsRNA molecule is by solid phase oligonucleotide synthesis. In yet another embodiment, synthesis of the first, second, and third strands of a dsRNA molecule is by solid phase tandem oligonucleotide synthesis.

[0138] Chemically synthesizing nucleic acid molecules with substitutions or modifications (base, sugar, phosphate, or any combination thereof) can prevent their degradation by serum ribonucleases, which may lead to increased potency. See, e.g., Eckstein et al., PCT Publication No. WO 92/07065; Perrault et al., Nature 344:565, 1990; Pieken et al., Science 253:314, 1991; Usman and Cedergren, Trends in Biochem. Sci. 17:334, 1992; Usman et al., Nucleic Acids Symp. Ser. 31:163, 1994; Beigelman et al., J. Biol. Chem. 270:25702, 1995; Burgin et al., Biochemistry 35:14090, 1996; Burlina et al., Bioorg. Med. Chem. 5:1999, 1997; Thompson et al., Karpeisky et al., Tetrahedron Lett. 39:1131, 1998; Earnshaw and Gait, Biopolymers (Nucleic Acid Sciences) 48:39-55, 1998; Verma and Eckstein, Annu. Rev. Biochem. 67:99, 1998; Herdewijn, Antisense Nucleic Acid Drug Dev. 10:297, 2000; Kurreck, Eur. J. Biochem. 270:1628, 2003; Dorsett and Tuschl, Nature Rev. Drug Discov. 3:318, 2004; PCT Publication Nos. WO 91/03162; WO 93/15187; WO 97/26270; WO 98/13526; U.S. Pat. Nos. 5,334,711; 5,627,053; 5,716,824; 5,767,264; 6,300,074. Each of the above references discloses various substitutions and chemical modifications to the base, phosphate, or sugar moieties of nucleic acid molecules, which can be used in the dsRNAs described herein. For example, oligonucleotides can be modified at the sugar moiety to enhance stability or prolong biological activity by increasing nuclease resistance. Representative sugar modifications include 2′-amino, 2′-C-allyl, 2′-fluoro, 2′-O-methyl, 2′-O-allyl, or 2′-H. Other modifications to enhance stability or prolong biological activity can be internucleoside linkages, such as phosphorothioate, or base-modifications, such as locked nucleic acids (see, e.g., U.S. Pat. Nos. 6,670,461; 6,794,499; 6,268,490), or 5-methyluridine or 2′-O-methyl-5-methyluridine in place of uridine (see, e.g. U.S. Patent Application Publication No. 2006/0142230). Hence, dsRNA molecules of the instant disclosure can be modified to increase nuclease resistance or duplex stability while substantially retaining or having enhanced RNAi activity as compared to unmodified dsRNA.

[0139] In one embodiment, this disclosure features substituted or modified dsRNA molecules, such as phosphate backbone modifications comprising one or more phosphorothioate, phosphorodithioate, methylphosphonate, phosphotriester, morpholino, amidate carbamate, carboxymethyl, acetamidate, polyamide, sulfonate, sulfonamide, sulfamate, formacetal, thioformacetal, or alkylsilyl substitutions. For a review of oligonucleotide backbone modifications, see Hunziker and Leumann, Nucleic Acid Analogues: Synthesis and Properties, in Modern Synthetic Methods, VCH, 331-417, 1995; and Mesmaeker et al., ACS, 24-39, 1994.

[0140] In another embodiment, a conjugate molecule can be optionally attached to a dsRNA or analog thereof that decreases expression of a RAS gene by RNAi. For example, such conjugate molecules may be polyethylene glycol, human serum albumin, polyarginine, Gln-Asn polymer, or a ligand for a cellular receptor that can, for example, mediate cellular uptake (e.g., HIV TAT, see Vocero-Akbani et al., Nature Med. 5:23, 1999; see also U.S. Patent Application Publication No. 2004/0132161). Examples of specific conjugate molecules contemplated by the instant disclosure that can be attached to a dsRNA or analog thereof of this disclosure are described in Vargeese et al., U.S. Patent Application Publication No. 2003/0130186, and U.S. Patent Application Publication No. 2004/0110296. In another embodiment, a conjugate molecule is covalently attached to a dsRNA or analog thereof that decreases expression of a RAS gene by RNAi via a biodegradable linker. In certain embodiments, a conjugate molecule can be attached at the 3′-end of either the sense strand, the antisense strand, or both strands of a dsRNA molecule provided herein. In another embodiment, a conjugate molecule can be attached at the 5′-end of either the sense strand, the antisense strand, or both strands of the dsRNA or analog thereof. In yet another embodiment, a conjugate molecule is attached at both the 3′-end and 5′-end of either the sense strand, the antisense strand, or both strands of a dsRNA molecule, or any combination thereof. In further embodiments, a conjugate molecule of this disclosure comprises a molecule that facilitates delivery of a dsRNA or analog thereof into a biological system, such as a cell. A person of skill in the art can screen dsRNA of this disclosure having various conjugates to determine whether the dsRNA-conjugate possesses improved properties (e.g., pharmacokinetic profiles, bioavailability, stability) while maintaining the ability to mediate RNAi in, for example, an animal model as described herein or generally known in the art.

Methods for Selecting dsRNA Molecules Specific for RAS

[0141] As indicated herein, the present disclosure also provides methods for selecting dsRNA and analogs thereof that are capable of specifically binding to a RAS gene (including a mRNA splice variant thereof) while being incapable of specifically binding or minimally binding to non-RAS genes. The selection process disclosed herein is useful, for example, in eliminating dsRNAs analogs that are cytotoxic due to non-specific binding to, and subsequent degradation of, one or more non-RAS genes.

[0142] Methods of the present disclosure do not require a priori knowledge of the nucleotide sequence of every possible gene variant (including mRNA splice variants) targeted by the dsRNA or analog thereof. In one embodiment, the nucleotide sequence of the dsRNA is selected from a conserved region or consensus sequence of a RAS gene. In another embodiment, the nucleotide sequence of the dsRNA may be selectively or preferentially targeted to a certain sequence contained in an mRNA splice variant of a RAS gene.

[0143] In certain embodiments, methods are provided for selecting one or more dsRNA molecule that decreases expression of a RAS gene by RNAi, comprising a first strand that is complementary to an HRAS mRNA as set forth in SEQ ID NO:1158 or 1159, a KRAS mRNA as set forth in SEQ ID NO:1309 or 1310, or an NRAS mRNA as set forth in SEQ ID NO:2281, and a second strand that is complementary to the first strand, wherein the first and second strands form a double-stranded region of about 15 to about 40 base pairs (see, e.g., HRAS, KRAS, or NRAS sequences in the Sequence Listing identified herein), and wherein at least one uridine of the dsRNA molecule is replaced with a 5-methyluridine or 2-thioribothymidine or 2′-O-methyl-5-methyluridine, which methods employ “off-target” profiling whereby one or more dsRNA provided herein is contacted with a cell, either in vivo or in vitro, and total mRNA is collected for use in probing a microarray comprising oligonucleotides having one or more nucleotide sequence from a panel of known genes, including non-RAS genes (e.g. interferon). Within related embodiments, one or more dsRNA molecule that decreases expression of a RAS gene by RNAi may further comprise a third strand that is complementary to the first strand, wherein the first and third strands form a double-stranded region wherein the double-stranded region formed by the first and third strands is non-overlapping with a double-stranded region formed by the first and second strands. The “off-target” profile of the dsRNA provided herein is quantified by determining the number of non-RAS genes having reduced expression levels in the presence of the candidate dsRNAs. The existence of “off target” binding indicates a dsRNA is capable of specifically binding to one or more non-RAS gene messages. In certain embodiments, a dsRNA as provided herein (see, e.g. sequences in the Sequence Listing identified herein) applicable to therapeutic use will exhibit a greater stability, minimal interferon response, and little or no “off-target” binding.

[0144] Still further embodiments provide methods for selecting more efficacious dsRNA by using one or more reporter gene constructs comprising a constitutive promoter, such as a cytomegalovirus (CMV) or phosphoglycerate kinase (PGK) promoter, operably fused to, and capable of altering the expression of one or more reporter genes, such as a luciferase, chloramphenicol (CAT), or β-galactosidase, which, in turn, is operably fused in-frame with a dsRNA (such as one having a length between about 15 base-pairs and about 40 base-pairs or from about 5 nucleotides to about 24 nucleotides, or about 25 nucleotides to about 40 nucleotides) that contains a RAS sequence, as provided herein.

[0145] Individual reporter gene expression constructs may be co-transfected with one or more dsRNA or analog thereof. The capacity of a given dsRNA to reduce the expression level of RAS may be determined by comparing the measured reporter gene activity in cells transfected with or without a dsRNA molecule of interest.

[0146] Certain embodiments disclosed herein provide methods for selecting one or more modified dsRNA molecule(s) that employ the step of predicting the stability of a dsRNA duplex. In some embodiments, such a prediction is achieved by employing a theoretical melting curve wherein a higher theoretical melting curve indicates an increase in dsRNA duplex stability and a concomitant decrease in cytotoxic effects. Alternatively, stability of a dsRNA duplex may be determined empirically by measuring the hybridization of a single RNA analog strand as described herein to a complementary target gene within, for example, a polynucleotide array. The melting temperature (i.e., the Tₘ value) for each modified RNA and complementary RNA immobilized on the array can be determined and, from this Tₘ value, the relative stability of the modified RNA pairing with a complementary RNA molecule determined.

[0147] For example, Kawase et al. (Nucleic Acids Res. 14:7727, 1986) have described an analysis of the nucleotide-pairing properties of Di (inosine) to A, C, G, and T, which was achieved by measuring the hybridization of oligonucleotides (ODNs) with Di in various positions to complementary sets of ODNs made as an array. The relative strength of nucleotide-pairing is I-C>I-A>I-G≈I-T. Generally, Di containing duplexes showed lower Tₘ values when compared to the corresponding wild type (WT) nucleotide pair. The stabilization of Di by pairing was in order of Dc>Da>Dg>Dt>Du. As a person of skill in the art would understand, although universal-binding nucleotides are used herein as an example of determining duplex stability (i.e., the Tₘ value), other nucleotide substitutions (e.g., 5-methyluridine for uridine) or further modifications (e.g., a ribose modification at the 2′-position) can also be evaluated by these or similar methods.

[0148] In still further embodiments of the presently disclosed methods, one or more anti-codon within an antisense strand of a dsRNA molecule or analog thereof is substituted with a universal-binding nucleotide in a second or third position in the anti-codon of the antisense strand. By substituting a universal-binding nucleotide for a first or second position, the one or more first or second position nucleotide-pair substitution allows the substituted dsRNA molecule to specifically bind to mRNA wherein a first or a second position nucleotide-pair substitution has occurred, wherein the one or more nucleotide-pair substitution results in an amino acid change in the corresponding gene product.

[0149] Any of these methods of identifying dsRNA of interest can also be used to examine a dsRNA that decreases expression of a RAS gene by RNA interference, comprising a first strand that is complementary to an HRAS mRNA as set forth in SEQ ID NO:1158 or 1159, a KRAS mRNA as set forth in SEQ ID NO:1309 or 1310, or an NRAS mRNA as set forth in SEQ ID NO:2281, and a second and third strand that have non-overlapping complementarity to the first strand, wherein the first and at least one of the second or third strand form a double-stranded region of about 5 to 13 base pairs; wherein at least one pyrimidine of the dsRNA comprises a pyrimidine nucleoside according to Formula I or II:

[chemical structure]

wherein R¹ and R² are each independently a —H, —OH, —OCH₃, —OCH₂OCH₂CH₃, —OCH₂CH₂OCH₃, halogen, substituted or unsubstituted C₁-C₁₀ alkyl, alkoxy, alkoxyalkyl, hydroxyalkyl, carboxyalkyl, alkylsulfonylamino, aminoalkyl, dialkylamino, alkylaminoalkyl, dialkylaminoalkyl, haloalkyl, trifluoromethyl, cycloalkyl, (cycloalkyl)alkyl, substituted or unsubstituted C₂-C₁₀ alkenyl, substituted or unsubstituted —O-allyl, —O—CH₂CH═CH₂, —O—CH═CHCH₃, substituted or unsubstituted C₂-C₁₀ alkynyl, carbamoyl, carbamyl, carboxy, carbonylamino, substituted or unsubstituted aryl, substituted or unsubstituted aralkyl, —NH₂, —NO₂, —C≡N, or heterocyclo group; R³ and R⁴ are each independently a hydroxyl, a protected hydroxyl, or an internucleoside linking group; and R⁵ and R⁸ are independently O or S. In certain embodiments, at least one nucleoside is according to Formula I in which R¹ is methyl and R² is —OH, or R¹ is methyl, R² is —OH, and R⁸ is S. In certain embodiments, at least one nucleoside is according to Formula I in which R¹ is methyl and R² is —O-methyl, or R¹ is methyl, R² is —O-methyl, and R⁸ is O. In other embodiments, the internucleoside linking group covalently links from about 5 to about 40 nucleosides.

### Compositions and Methods of Use

[0150] As set forth herein, dsRNA of the instant disclosure are designed to target a RAS gene (including one or more mRNA splice variant thereof) that is expressed at an elevated level or continues to be expressed when it should not, and is a causal or contributing factor associated with one or more hyperproliferative diseases or disorders, for example, leukemia, cutaneous melanoma, adenocarcinoma, squamous cell carcinoma, Philadelphia chromosome-negative myeloproliferative disorder, myelodysplastic syndrome, transitional cell carcinoma, ovarian cancer, brain tumors, breast cancer, bladder cancer, lung cancer, kidney tumors, urinary tract tumors, pancreatic carcinoma, and colorectal adenoma; as well as one or more angiogenic diseases or disorders. In this context, a dsRNA or analog thereof of this disclosure will effectively downregulate expression of a RAS gene to levels that prevent, alleviate, or reduce the severity or recurrence of one or more associated disease symptoms. Alternatively, for various distinct disease models in which expression of a RAS gene is not necessarily elevated as a consequence or sequel of disease or other adverse condition, down regulation of a RAS gene will nonetheless result in a therapeutic result by lowering gene expression (i.e., to reduce levels of a selected mRNA or protein product of an HRAS, KRAS, or NRAS gene). Furthermore, dsRNAs of this disclosure may be targeted to lower expression of RAS, which can result in upregulation of a “downstream” gene whose expression is negatively regulated, directly or indirectly, by a RAS protein. The dsRNA molecules of the instant disclosure comprise useful reagents and can be used in methods for a variety of therapeutic, diagnostic, target validation, genomic discovery, genetic engineering, and pharmacogenomic applications.

[0151] In certain embodiments, aqueous suspensions contain dsRNA of this disclosure in admixture with suitable excipients, such as suspending agents or dispersing or wetting agents. Exemplary suspending agents include sodium carboxymethylcellulose, methylcellulose, hydropropyl-methylcellulose, sodium alginate, polyvinylpyrrolidone, gum tragacanth and gum acacia. Representative dispersing or wetting agents include naturally-occurring phosphatides (e.g., lecithin), condensation products of an alkylene oxide with fatty acids (e.g. polyoxyethylene stearate), condensation products of ethylene oxide with long chain aliphatic alcohols (e.g., heptadecaethyleneoxycetanol), condensation products of ethylene oxide with partial esters derived from fatty acids and hexitol (e.g., polyoxyethylene sorbitol monooleate), or condensation products of ethylene oxide with partial esters derived from fatty acids and hexitol anhydrides (e.g., polyethylene sorbitan monooleate). In certain embodiments, the aqueous suspensions can optionally contain one or more preservatives (e.g., ethyl or n-propyl-p-hydroxybenzoate), one or more coloring agents, one or more flavoring agents, or one or more sweetening agents (e.g., sucrose, saccharin). In additional embodiments, dispersible powders and granules suitable for preparation of an aqueous suspension by the addition of water provide dsRNA of this disclosure in admixture with a dispersing or wetting agent, suspending agent and optionally one or more preservative, coloring agent, flavoring agent, or sweetening agent.

[0152] The present disclosure includes dsRNA compositions prepared for storage or administration that include a pharmaceutically effective amount of a desired compound in a pharmaceutically acceptable carrier or diluent. Acceptable carriers or diluents for therapeutic use are well known in the pharmaceutical art, and are described, for example, in Remington's Pharmaceutical Sciences, Mack Publishing Co., A. R. Gennaro edit., 1985, hereby incorporated by reference herein. In certain embodiments, pharmaceutical compositions of this disclosure can optionally include preservatives, antioxidants, stabilizers, dyes, flavoring agents, or any combination thereof. Exemplary preservatives include sodium benzoate, sorbic acid, chlorobutanol, and esters of p-hydroxybenzoic acid.

[0153] The dsRNA compositions of the instant disclosure can be effectively employed as pharmaceutically-acceptable formulations. Pharmaceutically-acceptable formulations prevent, alter the occurrence or severity of, or treat (alleviate one or more symptom(s) to a detectable or measurable extent) of a disease state or other adverse condition in a subject. A pharmaceutically acceptable formulation includes salts of the above compounds, e.g., acid addition salts, such as salts of hydrochloric acid, hydrobromic acid, acetic acid, or benzene sulfonic acid. A pharmaceutical composition or formulation refers to a composition or formulation in a form suitable for administration into a cell, or a subject such as a human (e.g., systemic administration). The formulations of the present disclosure, having an amount of dsRNA sufficient to treat or prevent a disorder associated with RAS gene expression are, for example, suitable for topical (e.g., creams, ointments, skin patches, eye drops, ear drops) application or administration. Other routes of administration include oral, parenteral, sublingual, bladder wash-out, vaginal, rectal, enteric, suppository, nasal, and inhalation. The term parenteral, as used herein, includes subcutaneous, intravenous, intramuscular, intraarterial, intraabdominal, intraperitoneal, intraarticular, intraocular or retrobulbar, intraaural, intrathecal, intracavitary, intracelial, intraspinal, intrapulmonary or transpulmonary, intrasynovial, and intraurethral injection or infusion techniques. The pharmaceutical compositions of this disclosure are formulated so the dsRNA contained therein can be bioavailable upon administration to a subject.

[0154] In further embodiments, dsRNA of this disclosure can be formulated as oily suspensions or emulsions (e.g., oil-in-water) by suspending dsRNA in, for example, a vegetable oil (e.g. arachis oil, olive oil, sesame oil or coconut oil) or a mineral oil (e.g., liquid paraffin). Suitable emulsifying agents can be naturally-occurring gums (e.g., gum acacia or gum tragacanth), naturally-occurring phosphatides (e.g., soy bean, lecithin, esters or partial esters derived from fatty acids and hexitol), anhydrides (e.g., sorbitan monooleate), or condensation products of partial esters with ethylene oxide (e.g., polyoxyethylene sorbitan monooleate). In certain embodiments, the oily suspensions or emulsions can optionally contain a thickening agent, such as beeswax, hard paraffin or cetyl alcohol. In related embodiments, sweetening agents and flavoring agents can optionally be added to provide palatable oral preparations. In yet other embodiments, these compositions can be preserved by optionally adding an anti-oxidant, such as ascorbic acid.

[0155] In further embodiments, dsRNA of this disclosure can be formulated as syrups and elixirs with sweetening agents (e.g., glycerol, propylene glycol, sorbitol, glucose or sucrose). Such formulations can also contain a demulcent, preservative, flavoring, coloring agent, or any combination thereof. In other embodiments, pharmaceutical compositions comprising dsRNA of this disclosure can be in the form of a sterile, injectable aqueous or oleaginous suspension. The sterile injectable preparation can also be a sterile, injectable solution or suspension in a non-toxic parenterally acceptable diluent or solvent (e.g., as a solution in 1,3-butanediol). Among the exemplary acceptable vehicles and solvents useful in the compositions of this disclosure is water, Ringer's solution, or isotonic sodium chloride solution. In addition, sterile, fixed oils may be employed as a solvent or suspending medium for the dsRNA of this disclosure. For this purpose, any bland fixed oil can be employed including synthetic mono- or diglycerides. In addition, fatty acids such as oleic acid find use in the preparation of parenteral formulations.

[0156] Within certain embodiments of this disclosure, pharmaceutical compositions and methods are provided that feature the presence or administration of one or more dsRNA or analogs thereof of this disclosure, combined, complexed, or conjugated with a polypeptide, optionally formulated with a pharmaceutically-acceptable carrier, such as a diluent, stabilizer, buffer, or the like. The negatively charged dsRNA molecules of this disclosure may be administered to a patient by any standard means, with or without stabilizers, buffers, or the like, to form a composition suitable for treatment. When it is desired to use a liposome delivery mechanism, standard protocols for formation of liposomes can be followed. The compositions of the present disclosure may also be formulated and used as a tablet, capsule or elixir for oral administration, suppository for rectal administration, sterile solution, or suspension for injectable administration, either with or without other compounds known in the art. Thus, dsRNAs of the present disclosure may be administered in any form, such as nasally, transdermally, parenterally, or by local injection.

[0157] In accordance with this disclosure, dsRNA molecules (optionally substituted or modified or conjugated), compositions thereof, and methods for inhibiting expression of a RAS gene in a cell or organism are provided. In certain embodiments, this disclosure provides methods and dsRNA compositions for treating a subject, including a human cell, tissue or individual, having a disease or at risk of developing a disease caused by or associated with the expression of a RAS gene. In one embodiment, the method includes administering a dsRNA of this disclosure or a pharmaceutical composition containing the dsRNA to a cell or an organism, such as a mammal, such that expression of the target gene is silenced. Subjects (e.g. mammalian, human) amendale for treatment using the dsRNA molecules (optionally substituted or modified or conjugated), compositions thereof, and methods of the present disclosure include those suffering from one or more disease or condition mediated, at least in part, by overexpression or inappropriate expression of a RAS gene, or which are amenable to treatment by reducing expression of a RAS protein, including one or more hyperproliferative diseases or disorders, for example, leukemia, cutaneous melanoma, adenocarcinoma, squamous cell carcinoma, Philadelphia chromosome-negative myeloproliferative disorder, myelodysplastic syndrome, transitional cell carcinoma, ovarian cancer, brain tumors, breast cancer, bladder cancer, lung cancer, kidney tumors, urinary tract tumors, pancreatic carcinoma, and colorectal adenoma; as well as one or more angiogenic diseases or disorders. Within exemplary embodiments, the compositions and methods of this disclosure are also useful as therapeutic tools to regulate expression of HRAS, KRAS, or NRAS to treat or prevent symptoms of, for example, the conditions listed herein.

[0158] In any of the methods disclosed herein there may be used with one or more dsRNA, or substituted or modified dsRNA, as described herein, comprising a first strand that is complementary to a human HRAS mRNA as set forth in SEQ ID NO:1158 or 1159, human KRAS mRNA as set forth in SEQ ID NO:1309 or 1310, or human NRAS mRNA as set forth in SEQ ID NO:2281, and a second strand and a third strand that is each complementary to non-overlapping regions of the first strand, wherein the second strand and third strands can anneal with the first strand to form at least two double-stranded regions spaced apart by up to 10 nucleotides and thereby forming a gap between the second and third strands, and wherein the mdRNA molecule optionally includes at least one double-stranded region comprises from 5 base pairs to 13 base pairs. In other embodiments, subjects can be effectively treated, prophylactically or therapeutically, by administering an effective amount of one or more dsRNA having a first strand that is complementary to a human HRAS mRNA as set forth in SEQ ID NO:1158 or 1159, human KRAS mRNA as set forth in SEQ ID NO:1309 or 1310, or human NRAS mRNA as set forth in SEQ ID NO:2281, and a second strand and a third strand that is each complementary to non-overlapping regions of the first strand, wherein the second strand and third strands can anneal with the first strand to form at least two double-stranded regions spaced apart by up to 10 nucleotides and thereby forming a gap between the second and third strands, and the mdRNA molecule optionally includes at least one double-stranded region of 5 base pairs to 13 base pairs and at least one pyrimidine nucleoside of the mdRNA is according to Formula I or II:

[chemical structure]

wherein R¹ and R² are each independently a —H, —OH, —OCH₃, —OCH₂OCH₂CH₃, —OCH₂CH₂OCH₃, halogen, substituted or unsubstituted C₁-C₁₀ alkyl, alkoxy, alkoxyalkyl, hydroxyalkyl, carboxyalkyl, alkylsulfonylamino, aminoalkyl, dialkylamino, alkylaminoalkyl, dialkylaminoalkyl, haloalkyl, trifluoromethyl, cycloalkyl, (cycloalkyl)alkyl, substituted or unsubstituted C₂-C₁₀ alkenyl, substituted or unsubstituted —O-allyl, —O—CH₂CH═CH₂, —O—CH═CHCH₃, substituted or unsubstituted C₂-C₁₀ alkynyl, carbamoyl, carbamyl, carboxy, carbonylamino, substituted or unsubstituted aryl, substituted or unsubstituted aralkyl, —NH₂, —NO₂, —C≡N, or heterocyclo group; R³ and R⁴ are each independently a hydroxyl, a protected hydroxyl, or an internucleoside linking group; and R⁵ and R⁸ are independently O or S. In certain embodiments, at least one nucleoside is according to Formula I in which R¹ is methyl and R² is —OH, or R¹ is methyl, R² is —OH, and R⁸ is S. In other embodiments, at least one nucleoside is according to Formula I in which R¹ is methyl and R² is —O-methyl, or R¹ is methyl, R² is —O-methyl, and R⁸ is O. In certain embodiments, the internucleoside linking group covalently links from about 5 to about 40 nucleosides.

[0159] In any of the methods described herein, the dsRNA used may include multiple modifications. For example, a dsRNA can have at least one 5-methyluridine, 2′-O-methyl-5-methyluridine, LNA, 2′-methoxy, 2′-fluoro, 2′-deoxy, phosphorothioate linkage, inverted base terminal cap, or any combination thereof. In certain exemplary methods, a dsRNA will have from one to all 5-methyluridines and have up to about 75% LNA. In other exemplary methods, a dsRNA will have from one to all 5-methyluridines and have up to about 75% 2′-methoxy provided the 2′-methoxy are not at the Argonaute cleavage site. In still other exemplary methods, a dsRNA will have from one to all 5-methyluridines and have up to about 100% 2′-luoro substitutions. In further exemplary methods, a dsRNA will have from one to all 5-ethyluridines and have up to about 75% 2′-deoxy. In further exemplary methods, a dsRNA will have up to about 75% LNA and have up to about 75% 2′-methoxy. In still other embodiments, a dsRNA will have up to about 75% LNA and have up to about 100% 2′-fluoro. In further exemplary methods, a dsRNA will have up to about 75% LNA and have up to about 75% 2′-deoxy. In further exemplary methods, a dsRNA will have up to about 75% 2′-methoxy and have up to about 100% 2′-fluoro. In further exemplary methods, a dsRNA will have up to about 75% 2′-methoxy and have up to about 75% 2′-deoxy. In further embodiments, a dsRNA will have up to about 100% 2′-fluoro and have up to about 75% 2′-deoxy.

[0160] In other exemplary methods for using multiply modified dsRNA, a dsRNA will have from one to all uridines substituted with 5-methyluridine, up to about 75% LNA, and up to about 75% 2′-methoxy. In still further exemplary methods, a dsRNA will have from one to all 5-methyluridines, up to about 75% LNA, and up to about 100% 2′-fluoro. In further exemplary methods, a dsRNA will have from one to all 5-methyluridines, up to about 75% LNA, and up to about 75% 2′-deoxy. In further exemplary methods, a dsRNA will have from one to all 5-methyluridines, up to about 75% 2′-methoxy, and up to about 75% 2′-fluoro. In further exemplary methods, a dsRNA will have from one to all 5-methyluridines, up to about 75% 2′-methoxy, and up to about 75% 2′-deoxy. In more exemplary methods, a dsRNA will have from one to all 5-methyluridines, up to about 100% 2′-fluoro, and up to about 75% 2′-deoxy. In yet other exemplary methods, a dsRNA will have from one to all 5-methyluridines, up to about 75% LNA, up to about 75% 2′-methoxy, up to about 100% 2′-fluoro, and up to about 75% 2′-deoxy. In other exemplary methods, a dsRNA will have up to about 75% LNA, up to about 75% 2′-methoxy, and up to about 100% 2′-fluoro. In further exemplary methods, a dsRNA will have up to about 75% LNA, up to about 75% 2′-methoxy, and up to about 75% 2′-deoxy. In more exemplary methods, a dsRNA will have up to about 75% LNA, up to about 100% 2′-fluoro, and up to about 75% 2′-deoxy. In still further exemplary methods, a dsRNA will have up to about 75% 2′-methoxy, up to about 100% 2′-fluoro, and up to about 75% 2′-deoxy.

[0161] In any of these exemplary methods for using multiply modified dsRNA, the dsRNA may further comprise up to 100% phosphorothioate internucleoside linkages, from one to ten or more inverted base terminal caps, or any combination thereof. Additionally, any of these dsRNA may have these multiple modifications on one strand, two strands, three strands, a plurality of strands, or all strands, or on the same or different nucleoside within a dsRNA molecule. Finally, in any of these multiple modification dsRNA, the dsRNA must have gene silencing activity.

[0162] In further embodiments, subjects can be effectively treated, prophylactically or therapeutically, by administering an effective amount of one or more dsRNA, or substituted or modified dsRNA as described herein, having a first strand that is complementary to an HRAS mRNA as set forth in SEQ ID NO:1158 or 1159, a KRAS mRNA as set forth in SEQ ID NO:1309 or 1310, or an NRAS mRNA as set forth in SEQ ID NO:2281, and a second strand and a third strand that is each complementary to non-overlapping regions of the first strand, wherein the second strand and third strands can anneal with the first strand to form at least two double-stranded regions spaced apart by up to 10 nucleotides and thereby forming a gap between the second and third strands, and wherein the combined double-stranded regions total about 15 base pairs to about 40 base pairs and the mdRNA molecule optionally has blunt ends. In still further embodiments, methods disclosed herein there may be used with one or more dsRNA that comprises a first strand that is complementary to an HRAS mRNA as set forth in SEQ ID NO:1158 or 1159, a KRAS mRNA as set forth in SEQ ID NO:1309 or 1310, or an NRAS mRNA as set forth in SEQ ID NO:2281, and a second strand and a third strand that is each complementary to non-overlapping regions of the first strand, wherein the second strand and third strands can anneal with the first strand to form at least two double-stranded regions spaced apart by up to 10 nucleotides and thereby forming a gap between the second and third strands, and wherein the mdRNA has a combined double-stranded region totaling about 15 to about 40 base pairs, optionally has at least one double-stranded region of 5 base pairs to 13 base pairs, optionally has one or more blunt ends, or any combination thereof, and at least one pyrimidine of the mdRNA is a pyrimidine nucleoside according to Formula I or II:

[chemical structure]

wherein R¹ and R² are each independently a —H, —OH, —OCH₃, —OCH₂OCH₂CH₃, —OCH₂CH₂OCH₃, halogen, substituted or unsubstituted C₁-C₁₀ alkyl, alkoxy, alkoxyalkyl, hydroxyalkyl, carboxyalkyl, alkylsulfonylamino, aminoalkyl, dialkylamino, alkylaminoalkyl, dialkylaminoalkyl, haloalkyl, trifluoromethyl, cycloalkyl, (cycloalkyl)alkyl, substituted or unsubstituted C₂-C₁₀ alkenyl, substituted or unsubstituted —O-allyl, —O—CH₂CH═CH₂, —O—CH═CHCH₃, substituted or unsubstituted C₂-C₁₀ alkynyl, carbamoyl, carbamyl, carboxy, carbonylamino, substituted or unsubstituted aryl, substituted or unsubstituted aralkyl, —NH₂, —NO₂, —C≡N, or heterocyclo group; R³ and R⁴ are each independently a hydroxyl, a protected hydroxyl, or an internucleoside linking group; and R⁵ and R⁸ are independently O or S. In certain embodiments, at least one nucleoside is according to Formula I in which R¹ is methyl and R² is —OH, or R¹ is methyl, R² is —OH, and R⁸ is S. In certain embodiments, at least one nucleoside is according to Formula I in which R¹ is methyl and R² is —O-methyl, or R¹ is methyl, R² is —O-methyl, and R⁸ is O. In other embodiments, the internucleoside linking group covalently links from about 5 to about 40 nucleosides.

[0163] Within additional aspects of this disclosure, combination formulations and methods are provided comprising an effective amount of one or more dsRNA of the present disclosure in combination with one or more secondary or adjunctive active agents that are formulated together or administered coordinately with the dsRNA of this disclosure to control a RAS-associated disease or condition as described herein. Useful adjunctive therapeutic agents in these combinatorial formulations and coordinate treatment methods include, for example, enzymatic nucleic acid molecules, allosteric nucleic acid molecules, antisense, decoy, or aptamer nucleic acid molecules, antibodies such as monoclonal antibodies, small molecules and other organic or inorganic compounds including metals, salts and ions, and other drugs and active agents indicated for treating a RAS-associated disease or condition, including chemotherapeutic agents used to treat cancer, steroids, non-steroidal anti-inflammatory drugs (NSAIDs), tyrosine kinase inhibitors, or the like.

[0164] Exemplary chemotherapeutic agents include alkylating agents (e.g. cisplatin, oxaliplatin, carboplatin, busulfan, nitrosoureas, nitrogen mustards, uramustine, temozolomide), antimetabolites (e.g. aminopterin, methotrexate, mercaptopurine, fluorouracil, cytarabine), taxanes (e.g., paclitaxel, docetaxel), anthracyclines (e.g., doxorubicin, daunorubicin, epirubicin, idaruicin, mitoxantrone, valrubicin), bleomycin, mytomycin, actinomycin, hydroxyurea, topoisomerase inhibitors (e.g. camptothecin, topotecan, irinotecan, etoposide, teniposide), monoclonal antibodies (e.g., alemtuzumab, bevacizumab, cetuximab, gemtuzumab, panitumumab, rituximab, tositumomab, trastuzumab), vinca alkaloids (e.g. vincristine, vinblastine, vindesine, vinorelbine), cyclophosphamide, prednisone, leucovorin, oxaliplatin.

[0165] Some adjunctive therapies may be directed at targets that interact or associate with RAS or affect specific RAS biological activities. A variety of inhibitors of RAS have been described that may be suitably employed as adjunctive therapies including, but not limited to, small molecules and antibodies or fragments thereof.

[0166] Small molecule NRAS inhibitors include, for example, farnesyl transferase inhibitors, MEK1/2 inhibitors, and inhibitory RAS isoforms. Farnesyl transferase inhibitors, such as FTI-277 and R115777, interfere with the translocation of NRAS to the cell membrane (Ugurel et al., PLoS ONE 2:2, 2007; Lerner et al., Oncogene 15:11, 1997; Ochiai et al., Blood 102:9, 2003). A recent study showed that MEK1/2 inhibitors PD98059 and U0126 deactivated the NRAS-MEK-mitogen-activated protein kinase (MAPK) p44/42 pathway linked to ovine pulmonary adenocarcinoma (Maeda et al., J. Virol. 79:7, 2005). Dominant inhibitory mutant have been created for each of the three RAS isoforms that substitute serine 17 with aspargine (Matallanas et al., J. Biol. Chem. 278:7, 2003). Two of the three RAS isoforms, NRAS N17 and HRAS N17, were shown to inhibit wildtype NRAS (Matallanas et al., J. Biol. Chem. 278:7, 2003).

[0167] Small molecule HRAS inhibitors include, for example, farnesyl transferase inhibitors, S-Trans, Trans-farnesylthiosalicylic acid, and diallyl disulfide (DADS). Some known farnesyl transferase inhibitors include FTI-277 and R115777. Farnesyl transferase inhibitors, such as FTI-277 and R115777, interfere with the translocation of HRAS to the cell membrane (Lerner et al., Oncogene 15:11, 1997; Ochiai et al., Blood 102:9, 2003; Zhu et al., Blood 105: 12, 2005). S-Trans, Trans-farnesylthiosalicylic acid, a novel, synthetic, farnesylated, rigid carboxylic acid derivative has been shown to dislodge HRAS from its membrane anchorage domains and accelerate HRAS degradation (Gana-Weisz et al., Clinical Cancer Research 8, 2002). A naturally occurring organosulfur compound in garlic, DADS, has been shown to be effective in the treatment of experimental brain C6 glioma in a rat model (Perkins et al., Mol. Brain Res. 111, 2003). Additionally, dominant inhibitory mutants have been created for each of the three RAS isoforms that substitute serine 17 with aspargine (Matallanas et al., J. Biol. Chem. 278:7, 2003).

[0168] At least one known inhibitor of KRAS may be suitably employed as an adjunctive therapy. S-Trans, Trans-farnesylthiosalicylic acid, a novel, synthetic, farnesylated, rigid carboxylic acid derivative has been shown to dislodge KRAS from its membrane anchorage domains and accelerate KRAS degradation (Ji et al., J. Biol. Chem. 282: 19, 2007).

[0169] To practice the coordinate administration methods of this disclosure, a dsRNA is administered, simultaneously or sequentially, in a coordinated treatment protocol with one or more of the secondary or adjunctive therapeutic agents contemplated herein. The coordinate administration may be done in any order, and there may be a time period while only one or both (or all) active therapeutic agents, individually or collectively, exert their biological activities. A distinguishing aspect of all such coordinate treatment methods is that the dsRNA present in a composition elicits some favorable clinical response, which may or may not be in conjunction with a secondary clinical response provided by the secondary therapeutic agent. For example, the coordinate administration of the dsRNA with a secondary therapeutic agent as contemplated herein can yield an enhanced (synergistic) therapeutic response beyond the therapeutic response elicited by either or both the purified dsRNA or secondary therapeutic agent alone.

[0170] In another embodiment, a dsRNA of this disclosure can include a conjugate member on one or more of the terminal nucleotides of a dsRNA. The conjugate member can be, for example, a lipophile, a terpene, a protein binding agent, a vitamin, a carbohydrate, or a peptide. For example, the conjugate member can be naproxen, nitroindole (or another conjugate that contributes to stacking interactions), folate, ibuprofen, or a C5 pyrimidine linker. In other embodiments, the conjugate member is a glyceride lipid conjugate (e.g. a dialkyl glyceride derivatives), vitamin E conjugates, or thio-cholesterols. Additional conjugate members include peptides that function, when conjugated to a modified dsRNA of this disclosure, to facilitate delivery of the dsRNA into a target cell, or otherwise enhance delivery, stability, or activity of the dsRNA when contacted with a biological sample (e.g., a target cell expressing RAS). Exemplary peptide conjugate members for use within these aspects of this disclosure, include peptides PN27, PN28, PN29, PN58, PN61, PN73, PN158, PN159, PN173, PN182, PN183, PN202, PN204, PN250, PN361, PN365, PN404, PN453, PN509, and PN963, described, for example, in U.S. Patent Application Publication Nos. 2006/0040882 and 2006/0014289, and U.S. Provisional Patent Application Nos. 60/822,896 and 60/939,578; and PCT Application PCT/US2007/075744, which are all incorporated herein by reference. In certain embodiments, when peptide conjugate partners are used to enhance delivery of dsRNA of this disclosure, the resulting dsRNA formulations and methods will often exhibit further reduction of an interferon response in target cells as compared to dsRNAs delivered in combination with alternate delivery vehicles, such as lipid delivery vehicles (e.g., Lipofectamine™).

[0171] In still another embodiment, a dsRNA or analog thereof of this disclosure may be conjugated to the polypeptide and admixed with one or more non-cationic lipids or a combination of a non-cationic lipid and a cationic lipid to form a composition that enhances intracellular delivery of the dsRNA as compared to delivery resulting from contacting the target cells with a naked dsRNA. In more detailed aspects of this disclosure, the mixture, complex or conjugate comprising a dsRNA and a polypeptide can be optionally combined with (e.g., admixed or complexed with) a cationic lipid, such as Lipofectine™. To produce these compositions comprised of a polypeptide, dsRNA and a cationic lipid, the dsRNA and peptide may be mixed together first in a suitable medium such as a cell culture medium, after which the cationic lipid is added to the mixture to form a dsRNA/delivery peptide/cationic lipid composition. Optionally, the peptide and cationic lipid can be mixed together first in a suitable medium such as a cell culture medium, followed by the addition of the dsRNA to form the dsRNA/delivery peptide/cationic lipid composition.

[0172] This disclosure also features the use of dsRNA compositions comprising surface-modified liposomes containing, for example, poly(ethylene glycol) lipids (PEG-modified, or long-circulating liposomes or stealth liposomes) (Lasic et al., Chem. Rev. 95:2601, 1995; Ishiwata et al., Chem. Pharm. Bull. 43:1005, 1995; Lasic et al., Science 267:1275, 1995; Oku et al., Biochim. Biophys. Acta 1238:86, 1995; Liu et al., J. Biol. Chem. 42:24864, 1995; Choi et al., PCT Publication No. WO 96/10391; Ansell et al., PCT Publication No. WO 96/10390; Holland et al., PCT Publication No. WO 96/10392).

[0173] In another embodiment, compositions are provided for targeting dsRNA molecules of this disclosure to specific cell types, such as hepatocytes. For example, dsRNA can be complexed or conjugated glycoproteins or synthetic glycoconjugates glycoproteins or synthetic glycoconjugates having branched galactose (e.g., asialoorosomucoid), N-acetyl-D-galactosamine, or mannose (see, e.g., Wu and Wu, J. Biol. Chem. 262:4429, 1987; Baenziger and Fiete, Cell 22: 611, 1980; Connolly et al., J. Biol. Chem. 257:939, 1982; Lee and Lee, Glycoconjugate J. 4:317, 1987; Ponpipom et al., J. Med. Chem. 24:1388, 1981) for a targeted delivery to, for example, the liver.

[0174] A pharmaceutically effective dose is that dose required to prevent, inhibit the occurrence of, or treat (alleviate a symptom to some extent, preferably all of the symptoms) a disease state. The pharmaceutically effective dose depends on the type of disease, the composition used, the route of administration, the type of subject being treated, the physical characteristics of the specific subject under consideration for treatment, concurrent medication, and other factors that those skilled in the medical arts will recognize. For example, an amount between 0.1 mg/kg and 100 mg/kg body weight/day of active ingredients may be administered depending on the potency of a dsRNA of this disclosure.

[0175] A specific dose level for any particular patient depends upon a variety of factors including the activity of the specific compound employed, age, body weight, general health, sex, diet, time of administration, route of administration, rate of excretion, drug combination, and the severity of the particular disease undergoing therapy. Following administration of dsRNA compositions as disclosed herein, test subjects will exhibit about a 10% up to about a 99% reduction in one or more symptoms associated with the disease or disorder being treated, as compared to placebo-treated or other suitable control subjects.

[0176] Dosage levels in the order of about 0.1 mg to about 140 mg per kilogram of body weight per day can be useful in the treatment of the above-indicated conditions (about 0.5 mg to about 7 g per patient per day). The amount of active ingredient that can be combined with the carrier materials to produce a single dosage form varies depending upon the host treated and the particular mode of administration. Dosage unit forms generally contain between from about 1 mg to about 500 mg of an active ingredient.

[0177] A dosage form of a dsRNA or composition thereof of this disclosure can be liquid, an emulsion, or a micelle, or in the form of an aerosol or droplets. A dosage form of a dsRNA or composition thereof of this disclosure can be solid, which can be reconstituted in a liquid prior to administration. The solid can be administered as a powder. The solid can be in the form of a capsule, tablet, or gel. In addition to in vivo gene inhibition, a skilled artisan will appreciate that the dsRNA and analogs thereof of the present disclosure are useful in a wide variety of in vitro applications, such as scientific and commercial research (e.g., elucidation of physiological pathways, drug discovery and development), and medical and veterinary diagnostics.

[0178] Nucleic acid molecules and polypeptides can be administered to cells by a variety of methods known to those of skill in the art, including administration within formulations that comprise a dsRNA alone, a dsRNA and a polypeptide complex/conjugate alone, or that further comprise one or more additional components, such as a pharmaceutically acceptable carrier, diluent, excipient, adjuvant, emulsifier, stabilizer, preservative, or the like. Other exemplary substances used to approximate physiological conditions include pH adjusting and buffering agents, tonicity adjusting agents, and wetting agents, for example, sodium acetate, sodium lactate, sodium chloride, potassium chloride, calcium chloride, sorbitan monolaurate, triethanolamine oleate, and mixtures thereof. For solid compositions, conventional nontoxic pharmaceutically acceptable carriers can be used which include, for example, pharmaceutical grades of mannitol, lactose, starch, magnesium stearate, sodium saccharin, talcum, cellulose, glucose, sucrose, magnesium carbonate, and the like.

[0179] In certain embodiments, the dsRNA and compositions thereof can be encapsulated in liposomes, administered by iontophoresis, or incorporated into other vehicles, such as hydrogels, cyclodextrins, biodegradable nanocapsules, bioadhesive microspheres, or proteinaceous vectors (see, e.g. PCT Publication No. WO 00/53722). In certain embodiments of this disclosure, the dsRNA may be administered in a time release formulation, for example, in a composition that includes a slow release polymer. The dsRNA can be prepared with carriers that will protect against rapid release, for example, a controlled release vehicle such as a polymer, microencapsulated delivery system, or bioadhesive gel. Prolonged delivery of the dsRNA, in various compositions of this disclosure can be brought about by including in the composition agents that delay absorption, for example, aluminum monosterate hydrogels and gelatin.

[0180] Alternatively, a dsRNA composition of this disclosure can be locally delivered by direct injection or by use of, for example, an infusion pump. Direct injection of dsRNAs of this disclosure, whether subcutaneous, intramuscular, or intradermal, can be done by using standard needle and syringe methodologies or by needle-free technologies, such as those described in Conry et al. (Clin. Cancer Res. 5:2330, 1999) and PCT Publication No. WO 99/31262.

[0181] The dsRNA of this disclosure and compositions thereof may be administered to subjects by a variety of mucosal administration modes, including oral, rectal, vaginal, intranasal, intrapulmonary, or transdermal delivery, or by topical delivery to the eyes, ears, skin, or other mucosal surfaces. In one embodiment, the mucosal tissue layer includes an epithelial cell layer, which can be pulmonary, tracheal, bronchial, alveolar, nasal, buccal, epidermal, or gastrointestinal. Compositions of this disclosure can be administered using conventional actuators, such as mechanical spray devices, as well as pressurized, electrically activated, or other types of actuators. The dsRNAs can also be administered in the form of suppositories, e.g. for rectal administration. For example, these compositions can be mixed with an excipient that is solid at room temperature but liquid at the rectal temperature so that the dsRNA is released. Such materials include, for example, cocoa butter and polyethylene glycols.

[0182] Further methods for delivery of nucleic acid molecules, such as the dsRNAs of this disclosure, are described, for example, in Boado et al., J. Pharm. Sci. 87:1308, 1998; Tyler et al., FEBS Lett. 421:280, 1999; Pardridge et al., Proc. Nat'l Acad. Sci. USA 92:5592, 1995; Boado, Adv. Drug Delivery Rev. 15:73, 1995; Aldrian-Herrada et al., Nucleic Acids Res. 26:4910, 1998; Tyler et al., Proc. Nat'l Acad. Sci. USA 96:7053-7058, 1999; Akhtar et al., Trends Cell Bio. 2:139, 1992; “Delivery Strategies for Antisense Oligonucleotide Therapeutics,” ed. Akhtar, 1995, Maurer et al., Mol. Membr. Biol. 16:129, 1999; Hofland and Huang, Handb. Exp. Pharmacol 137:165, 1999; and Lee et al., ACS Symp. Ser. 752:184, 2000; PCT Publication No. WO 94/02595.

[0183] All U.S. patents, U.S. patent application publications, U.S. patent applications, foreign patents, foreign patent applications, non-patent publications, figures, tables, and websites referred to in this specification are expressly incorporated herein by reference, in their entirety.

### EXAMPLES

### Example 1

### Knockdown of Gene Expression by mdRNA

[0184] The gene silencing activity of dsRNA as compared to nicked or gapped versions of the same dsRNA was examined using a dual fluorescence assay. A total of 22 different genes were targeted at ten different sites each (see Table 1).

[0185] A Dicer substrate dsRNA molecule was used, which has a 25 nucleotide sense strand, a 27 nucleotide antisense strand, and a two deoxynucleotide overhang at the 3′-end of the antisense strand (referred to as a 25/27 dsRNA). The nicked version of each dsRNA Dicer substrate has a nick at one of positions 9 to 16 on the sense strand as measured from the 5′-end of the sense strand. For example, an ndsRNA having a nick at position 11 has three strands—a 5′-sense strand of 11 nucleotides, a 3′-sense strand of 14 nucleotides, and an antisense strand of 27 nucleotides (which is also referred to as an N11-14/27 mdRNA). In addition, each of the sense strands of the ndsRNA have three locked nucleic acids (LNAs) evenly distributed along each sense fragment. If the nick is at position 9, then the LNAs can be found at positions 2, 6, and 9 of the 5′ sense strand fragment and at positions 11, 18, and 23 of the 3′ sense strand fragment. If the nick is at position 10, then the LNAs can be found at positions 2, 6, and 10 of the 5′ sense strand fragment and at positions 12, 18, and 23 of the 3′ sense strand fragment. If the nick is at position 11, then the LNAs can be found at positions 2, 6, and 11 of the 5′ sense strand fragment and at positions 13, 18, and 23 of the 3′ sense strand fragment. If the nick is at position 12, then the LNAs can be found at positions 2, 6, and 12 of the 5′ sense strand fragment and at positions 14, 18, and 23 of the 3′ sense strand fragment. If the nick is at position 13, then the LNAs can be found at positions 2, 7, and 13 of the 5′ sense strand fragment and at positions 15, 18, and 23 of the 3′ sense strand fragment. If the nick is at position 14, then the LNAs can be found at positions 2, 7, and 14 of the 5′ sense strand fragment and at positions 16, 18, and 23 of the 3′ sense strand fragment. If the nick is at position 15, then the LNAs can be found at positions 2, 8, and 15 of the 5′ sense strand fragment and at positions 17, 19, and 23 of the 3′ sense strand fragment. If the nick is at position 16, then the LNAs can be found at positions 2, 8, and 16 of the 5′ sense strand fragment and at positions 18, 19, and 23 of the 3′ sense strand fragment. Similarly, a gapped version of each dsRNA Dicer substrate has a single nucleotide missing at one of positions 10 to 17 on the sense strand as measured from the 5′-end of the sense strand. For example, a gdsRNA having a gap at position 11 has three strands—a 5′-sense strand of 11 nucleotides, a 3′-sense strand of 13 nucleotides, and an antisense strand of 27 nucleotides (which is also referred to as G11-(1)-13/27 mdRNA). In addition, each of the sense strands of the gdsRNA contain three locked nucleic acids (LNAs) evenly distributed along each sense fragment (as described for the nicked counterparts).

[0186] In sum, three dsRNA were tested at each of the ten different sites per gene—an unmodified dsRNA, a nicked mdRNA with three LNAs per sense strand fragment, and a single nucleotide gapped mdRNA with three LNAs per sense strand fragment. In other words, 660 different dsRNA were examined.

[0187] Briefly, multiwell plates were seeded with about 7-8×10⁵ HeLa cells/well in DMEM having 10% fetal bovine serum, and incubated overnight at 37° C./5% CO₂. The HeLa cell medium was changed to serum-free DMEM just prior to transfection. The psiCHECK™-2 vector, containing about a 1,000 basepair insert of a target gene, diluted in serum-free DMEM was mixed with diluted GenJet™ transfection reagent (SignalDT Biosystems, Hayward, Calif.) according to the manufacturer's instructions and then incubated at room temperature for 10 minutes. The GenJet/psiCHECK™-2-[target gene insert] solution was added to the HeLa cells and then incubated at 37° C., 5% CO₂ for 4.5 hours. After the vector transfection, cells were trypsinized and suspended in antibiotic-free DMEM containing 10% FBS at a concentration of 10⁵ cells per mL.

[0188] To transfect the dsRNA, the dsRNA was formulated in OPTI-MEM I reduced serum medium (Gibco® Invitrogen, Carlsbad, Calif.) and placed in multiwell plates. Then Lipofectamine™ RNAiMAX (Invitrogen) was mixed with OPTI-MEM per manufacture's specifications, added to each well containing dsRNA, mixed manually, and incubated at room temperature for 10-20 minutes. Then 30 μL of vector-transfected HeLa cells at 10⁵ cells per mL were added to each well (final dsRNA concentration of 25 nM), the plates were spun for 30 seconds at 1,000 rpm, and then incubated at 37° C./5% CO₂ for 2 days. The Cell Titer Blue (CTB) reagent (Promega, Madison, Wis.) was used to assay for cell viability and proliferation—none of the dsRNA showed any substantial toxicity.

[0189] After transfecting, the media and CTB reagent were removed and the wells washed once with 100 PBS. Cells were assayed for firefly and Renilla luciferase reporter activity by first adding Dual-Glo™ Luciferase Reagent (Promega, Madison, Wis.) for 10 minutes with shaking, and then quantitating the luminescent signal on a VICTOR³™ 1420 Multilabel Counter (PerkinElmer). After measuring the firefly luminescence, Stop & Glo® Reagent (Promega, Madison, Wis.) was added for 10 minutes with shaking to simultaneously quench the firefly reaction and initiate the Renilla luciferase reaction, which was then quantitated on a VICTOR³™ 1420 Multilabel Counter (PerkinElmer). The results are presented in Table 1.

TABLE 1
Gene Silencing Activity* of dsRNA Dicer Substrate and mdRNA (nicked or gapped) Dicer Substrate

| | | | Dicer | Dicer | | | | | | | | |
|---|---|---|---|---|---|---|---|---|---|---|---|---|
| | | | SEQ ID | Mean | Dicer | Nicked | Nicked | Nicked | Gapped | Gapped | Gapped | Length |
| Set | Target | Post† | NOS‡ | (%) | 95% CI | SEQ ID NOS | Mean (%) | 95% CI | SEQ ID NOS | Mean (%) | 95% CI | 5′-S\hat{ } |
| 1 | AKT1 | 1862 | 63, 283 | 20.6 | 4.0% | 503, 723, 283 | 23.5 | 5.7% | 503, 940, 283 | 54.3 | 12.0% | 14 |
| 2 | AKT1 | 1883 | 64, 284 | 29.7 | 7.3% | 504, 724, 284 | 51.4 | 6.7% | 504, 941, 284 | 76.9 | 19.5% | 12 |
| 3 | AKT1 | 2178 | 65, 285 | 15.4 | 2.4% | 505, 725, 285 | 22.3 | 6.4% | 505, 942, 285 | 24.4 | 5.1% | 14 |
| 4 | AKT1 | 2199 | 66, 286 | 26.4 | 3.6% | 506, 726, 286 | 62.7 | 6.6% | 506, 943, 286 | 66.8 | 10.8% | 15 |
| 5 | AKT1 | 2264 | 67, 287 | 35.2 | 7.3% | 507, 727, 287 | 34.1 | 7.3% | 507, 944, 287 | 31.3 | 5.2% | 12 |
| 6 | AKT1 | 2580 | 68, 288 | 27.6 | 5.7% | 508, 728, 288 | 40.1 | 8.3% | 508, 945, 288 | 91.5 | 17.0% | 12 |
| 7 | AKT1 | 2606 | 69, 289 | 14.0 | 2.6% | 509, 729, 289 | 14.9 | 3.2% | 509, 946, 289 | 33.4 | 6.9% | 11 |
| 8 | AKT1 | 2629 | 70, 290 | 21.0 | 10.1% | 510, 730, 290 | 13.5 | 2.4% | 510, 947, 290 | 13.6 | 2.1% | 12 |
| 9 | AKT1 | 2661 | 71, 291 | 37.4 | 6.6% | 511, 731, 291 | 41.0 | 12.1% | 511, 948, 291 | 71.6 | 11.9% | 15 |
| 10 | AKT1 | 2663 | 72, 292 | 18.1 | 4.3% | 512, 732, 292 | 23.0 | 5.9% | 512, 949, 292 | 51.4 | 9.2% | 14 |
| 11 | BCR-ABL (b2a2) | 66 | 73, 293 | 16.9 | 5.9% | 513, 733, 293 | 30.4 | 10.5% | 513, 950, 293 | 38.2 | 11.7% | 13 |
| 12 | BCR-ABL (b2a2) | 190 | 74, 294 | 40.0 | 11.6% | 514, 734, 294 | 22.0 | 6.4% | 514, 951, 294 | 34.6 | 12.0% | 14 |
| 13 | BCR-ABL (b2a2) | 282 | 75, 295 | 24.2 | 5.2% | 515, 735, 295 | 37.6 | 8.2% | 515, 952, 295 | 34.6 | 8.6% | 13 |
| 14 | BCR-ABL (b2a2) | 284 | 76, 296 | 50.9 | 6.9% | 516, 736, 296 | 38.3 | 7.8% | 516, 953, 296 | 68.3 | 18.0% | 13 |
| 15 | BCR-ABL (b2a2) | 287 | 77, 297 | 45.5 | 13.2% | 517, 737, 297 | 39.6 | 11.5% | 517, 954, 297 | 75.2 | 17.2% | 14 |
| 16 | BCR-ABL (b2a2) | 289 | 78, 298 | 36.9 | 7.7% | 518, 738, 298 | 40.0 | 8.9% | 518, 955, 298 | 60.9 | 12.3% | 14 |
| 17 | BCR-ABL (b2a2) | 293 | 79, 299 | 55.9 | 9.8% | 519, 739, 299 | 58.6 | 14.7% | 519, 956, 299 | 87.0 | 14.3% | 13 |
| 18 | BCR-ABL (b2a2) | 461 | 80, 300 | 38.4 | 9.4% | 520, 740, 300 | 35.9 | 12.1% | 520, 957, 300 | 28.6 | 10.2% | 13 |
| 19 | BCR-ABL (b2a2) | 462 | 81, 301 | 31.1 | 13.7% | 521, 741, 301 | 26.5 | 5.5% | 521, 958, 301 | 35.8 | 10.7% | 14 |
| 20 | BCR-ABL (b2a2) | 561 | 82, 302 | 17.7 | 3.4% | 522, 742, 302 | 20.7 | 3.4% | 522, 959, 302 | 35.5 | 10.6% | 12 |
| 21 | BCR-ABL (b3a2) | 352 | 83, 303 | 45.4 | 7.0% | 523, 743, 303 | 39.8 | 8.3% | 523, 960, 303 | 45.5 | 11.0% | 12 |
| 22 | BCR-ABL (b3a2) | 353 | 84, 304 | 22.6 | 1.8% | 524, 744, 304 | 20.5 | 5.1% | 524, 961, 304 | 66.1 | 17.8% | 12 |
| 23 | BCR-ABL (b3a2) | 356 | 85, 305 | 11.9 | 2.5% | 525, 745, 305 | 28.4 | 5.8% | 525, 962, 305 | 56.0 | 10.6% | 13 |
| 24 | BCR-ABL (b3a2) | 357 | 86, 306 | 24.5 | 6.0% | 526, 746, 306 | 25.6 | 7.5% | 526, 963, 306 | 39.2 | 10.0% | 13 |
| 25 | BCR-ABL (b3a2) | 359 | 87, 307 | 56.8 | 9.3% | 527, 747, 307 | 42.4 | 7.3% | 527, 964, 307 | 46.4 | 9.5% | 13 |
| 26 | BCR-ABL (b3a2) | 360 | 88, 308 | 32.3 | 5.0% | 528, 748, 308 | 37.2 | 7.3% | 528, 965, 308 | 55.3 | 13.8% | 13 |
| 27 | BCR-ABL (b3a2) | 362 | 89, 309 | 12.4 | 3.2% | 529, 737, 309 | 26.3 | 9.8% | 529, 954, 309 | 46.2 | 8.3% | 14 |
| 28 | BCR-ABL (b3a2) | 410 | 90, 310 | 66.2 | 12.2% | 530, 749, 310 | 55.9 | 11.2% | 530, 966, 310 | 58.4 | 16.4% | 12 |
| 29 | BCR-ABL (b3a2) | 629 | 91, 311 | 35.0 | 11.7% | 531, 750, 311 | 46.5 | 10.1% | 531, 967, 311 | 41.0 | 9.0% | 13 |
| 30 | BCR-ABL (b3a2) | 727 | 92, 312 | 83.4 | 13.6% | 532, 751, 312 | 76.7 | 22.5% | 532, 968, 312 | 62.9 | 10.9% | 12 |
| 31 | EGFR | 4715 | 93, 313 | 15.3 | 2.2% | 533, 752, 313 | 9.4 | 0.9% | 533, 969, 313 | 11.3 | 1.7% | 11 |
| 32 | EGFR | 4759 | 94, 314 | 3.8 | 0.4% | 534, 753, 314 | 6.3 | 0.8% | 534, 970, 314 | 8.4 | 1.1% | 12 |
| 33 | EGFR | 4810 | 95, 315 | 5.2 | 0.6% | 535, 754, 315 | 5.8 | 0.7% | 535, 971, 315 | 7.2 | 1.0% | 13 |
| 34 | EGFR | 5249 | 96, 316 | 2.6 | 0.4% | 536, 755, 316 | 16.6 | 1.8% | 536, 972, 316 | 42.9 | 3.5% | 14 |
| 35 | EGFR | 5279 | 97, 317 | 7.6 | 1.0% | 537, 756, 317 | 10.6 | 1.1% | 537, 973, 317 | 11.8 | 1.7% | 13 |
| 36 | EGFR | 5374 | 98, 318 | 9.6 | 1.0% | 538, 757, 318 | 8.7 | 0.9% | 538, 974, 318 | 34.7 | 4.3% | 12 |
| 37 | EGFR | 5442 | 99, 319 | 4.1 | 0.8% | 539, 758, 319 | 15.1 | 1.8% | 539, 975, 319 | 19.7 | 2.4% | 12 |
| 38 | EGFR | 5451 | 100, 320 | 5.1 | 0.3% | 540, 759, 320 | 11.5 | 1.3% | 540, 976, 320 | 16.5 | 3.0% | 13 |
| 39 | EGFR | 5469 | 101, 321 | 5.6 | 0.8% | 541, 760, 321 | 5.1 | 0.5% | 541, 977, 321 | 12.2 | 2.5% | 13 |
| 40 | EGFR | 5483 | 102, 322 | 2.2 | 0.4% | 542, 761, 322 | 2.4 | 0.5% | 542, 978, 322 | 6.1 | 0.7% | 9 |
| 41 | FLT1 | 863 | 103, 323 | 7.6 | 1.1% | 543, 762, 323 | 10.2 | 3.3% | 543, 979, 323 | 29.2 | 8.1% | 12 |
| 42 | FLT1 | 906 | 104, 324 | 10.0 | 2.4% | 544, 763, 324 | 10.8 | 0.8% | 544, 980, 324 | 12.4 | 2.1% | 12 |
| 43 | FLT1 | 993 | 105, 325 | 12.2 | 2.5% | 545, 764, 325 | 13.7 | 2.8% | 545, 981, 325 | 20.0 | 11.3% | 13 |
| 44 | FLT1 | 1283 | 106, 326 | 19.6 | 4.5% | 546, 765, 326 | 25.8 | 7.3% | 546, 982, 326 | 18.7 | 6.5% | 12 |
| 45 | FLT1 | 1289 | 107, 327 | 15.5 | 2.0% | 547, 766, 327 | 13.5 | 1.6% | 547, 983, 327 | 22.5 | 5.0% | 12 |
| 46 | FLT1 | 1349 | 108, 328 | 36.8 | 4.2% | 548, 767, 328 | 22.9 | 4.0% | 548, 984, 328 | 52.7 | 5.4% | 14 |
| 47 | FLT1 | 1354 | 109, 329 | 36.6 | 4.0% | 549, 768, 329 | 49.7 | 5.9% | 549, 985, 329 | 45.8 | 9.3% | 14 |
| 48 | FLT1 | 1448 | 110, 330 | 9.3 | 2.5% | 550, 769, 330 | 16.1 | 2.9% | 550, 986, 330 | 24.2 | 3.6% | 13 |
| 49 | FLT1 | 1459 | 111, 331 | 13.7 | 3.6% | 551, 770, 331 | 20.0 | 8.7% | 551, 987, 331 | 22.4 | 4.4% | 12 |
| 50 | FLT1 | 1700 | 112, 332 | 7.9 | 2.2% | 552, 771, 332 | 11.2 | 3.7% | 552, 988, 332 | 36.4 | 8.0% | 13 |
| 51 | FRAP1 | 7631 | 113, 333 | 9.5 | 2.7% | 553, 772, 333 | 23.3 | 4.9% | 553, 989, 333 | 61.8 | 18.3% | 13 |
| 52 | FRAP1 | 7784 | 114, 334 | 15.1 | 1.7% | 554, 773, 334 | 19.9 | 2.8% | 554, 990, 334 | 29.3 | 3.4% | 12 |
| 53 | FRAP1 | 7812 | 115, 335 | 11.9 | 2.9% | 555, 774, 335 | 14.4 | 3.2% | 555, 991, 335 | 28.3 | 12.7% | 11 |
| 54 | FRAP1 | 7853 | 116, 336 | 16.8 | 3.3% | 556, 775, 336 | 24.1 | 3.7% | 556, 992, 336 | 67.5 | 9.2% | 11 |
| 55 | FRAP1 | 8018 | 117, 337 | 41.1 | 9.1% | 557, 776, 337 | 19.8 | 3.3% | 557, 993, 337 | 41.8 | 9.6% | 12 |
| 56 | FRAP1 | 8102 | 118, 338 | 35.7 | 5.1% | 558, 777, 338 | 30.2 | 6.3% | 558, 994, 338 | 39.5 | 9.9% | 12 |
| 57 | FRAP1 | 8177 | 119, 339 | 21.2 | 3.9% | 559, 778, 339 | 33.2 | 9.3% | 559, 995, 339 | 47.3 | 12.3% | 14 |
| 58 | FRAP1 | 8348 | 120, 340 | 25.8 | 3.6% | 560, 779, 340 | 26.8 | 4.4% | 560, 996, 340 | 37.4 | 4.7% | 11 |
| 59 | FRAP1 | 8435 | 121, 341 | 41.1 | 6.7% | 561, 780, 341 | 54.1 | 9.5% | 561, 997, 341 | 74.9 | 8.5% | 12 |
| 60 | FRAP1 | 8542 | 122, 342 | 23.1 | 4.8% | 562, 781, 342 | 16.5 | 5.5% | 562, 998, 342 | 33.6 | 6.4% | 10 |
| 61 | HIF1A | 1780 | 123, 343 | 76.6 | 14.9% | 563, 782, 343 | 89.2 | 11.9% | 563, 999, 343 | 86.3 | 9.3% | 12 |
| 62 | HIF1A | 1831 | 124, 344 | 9.0 | 0.6% | 564, 783, 344 | 14.0 | 2.3% | 564, 1000, 344 | 38.2 | 8.5% | 12 |
| 63 | HIF1A | 1870 | 125, 345 | 21.4 | 4.5% | 565, 784, 345 | 21.2 | 3.3% | 565, 1001, 345 | 19.6 | 2.2% | 13 |
| 64 | HIF1A | 1941 | 126, 346 | 8.9 | 2.1% | 566, 785, 346 | 11.4 | 2.2% | 566, 1002, 346 | 11.7 | 2.5% | 12 |
| 65 | HIF1A | 2068 | 127, 347 | 7.8 | 1.5% | 567, 786, 347 | 7.0 | 1.4% | 567, 1003, 347 | 16.9 | 3.9% | 12 |
| 66 | HIF1A | 2133 | 128, 348 | 13.0 | 2.0% | 568, 787, 348 | 16.7 | 3.1% | 568, 1004, 348 | 16.3 | 3.1% | 10 |
| 67 | HIF1A | 2232 | 129, 349 | 8.6 | 2.0% | 569, 788, 349 | 17.4 | 3.6% | 569, 1005, 349 | 37.8 | 9.6% | 13 |
| 68 | HIF1A | 2273 | 130, 350 | 19.1 | 5.3% | 570, 789, 350 | 23.4 | 4.4% | 570, 1006, 350 | 20.3 | 3.4% | 12 |
| 69 | HIF1A | 2437 | 131, 351 | 8.2 | 1.4% | 571, 790, 351 | 47.7 | 11.5% | 571, 1007, 351 | 72.4 | 14.3% | 13 |
| 70 | HIF1A | 2607 | 132, 352 | 8.0 | 2.1% | 572, 791, 352 | 11.0 | 1.2% | 572, 1008, 352 | 33.6 | 6.0% | 13 |
| 71 | IL17A | 923 | 133, 353 | 5.0 | 0.6% | 573, 792, 353 | 7.3 | 0.7% | 573, 1009, 353 | 26.3 | 2.5% | 12 |
| 72 | IL17A | 962 | 134, 354 | 6.7 | 0.8% | 574, 793, 354 | 7.7 | 0.9% | 574, 1010, 354 | 8.9 | 2.0% | 13 |
| 73 | IL17A | 969 | 135, 355 | 8.9 | 1.7% | 575, 794, 355 | 17.1 | 1.6% | 575, 1011, 355 | 49.5 | 4.3% | 14 |
| 74 | IL17A | 1098 | 136, 356 | 7.2 | 1.3% | 576, 795, 356 | 10.0 | 2.4% | 576, 1012, 356 | 15.4 | 2.8% | 12 |
| 75 | IL17A | 1201 | 137, 357 | 14.1 | 2.2% | 577, 796, 357 | 13.4 | 1.1% | 577, 1013, 357 | 17.2 | 2.8% | 12 |
| 76 | IL17A | 1433 | 138, 358 | 107.1 | 9.7% | 578, 797, 358 | 111.5 | 10.4% | 578, 1014, 358 | 108.1 | 8.8% | 13 |
| 77 | IL17A | 1455 | 139, 359 | 115.4 | 11.1% | 579, 798, 359 | 120.8 | 8.7% | 579, 1015, 359 | 120.3 | 9.9% | 12 |
| 78 | IL17A | 1478 | 140, 360 | 82.7 | 6.3% | 580, 799, 360 | 87.6 | 5.0% | 580, 1016, 360 | 95.9 | 5.6% | 14 |
| 79 | IL17A | 1663 | 141, 361 | 140.2 | 7.8% | 581, 800, 361 | 125.9 | 9.8% | 581, 1017, 361 | 114.7 | 10.1% | 14 |
| 80 | IL17A | 1764 | 142, 362 | 114.3 | 9.2% | 582, 801, 362 | 109.4 | 2.9% | 582, 1018, 362 | 105.7 | 8.1% | 15 |
| 81 | 1L18 | 210 | 143, 363 | 13.8 | 2.8% | 583, 802, 363 | 23.9 | 5.8% | 583, 1019, 363 | 21.4 | 5.7% | 14 |
| 82 | 1L18 | 368 | 144, 364 | 22.5 | 1.8% | 584, 803, 364 | 21.0 | 2.0% | 584, 1020, 364 | 29.7 | 3.7% | 13 |
| 83 | 1L18 | 479 | 145, 365 | 88.1 | 12.9% | 585, 804, 365 | 66.3 | 9.8% | 585, 1021, 365 | 80.0 | 16.8% | 14 |
| 84 | 1L18 | 508 | 146, 366 | 8.0 | 1.9% | 586, 805, 366 | 15.7 | 3.5% | 586, 1022, 366 | 17.0 | 5.7% | 12 |
| 85 | 1L18 | 521 | 147, 367 | 9.9 | 2.1% | 587, 806, 367 | 10.8 | 2.1% | 587, 1023, 367 | 18.4 | 3.3% | 11 |
| 86 | 1L18 | 573 | 148, 368 | 18.6 | 4.7% | 588, 807, 368 | 24.8 | 7.6% | 588, 1024, 368 | 48.8 | 7.7% | 14 |
| 87 | 1L18 | 605 | 149, 369 | 27.5 | 6.1% | 589, 808, 369 | 21.3 | 3.9% | 589, 1025, 369 | 14.9 | 2.7% | 13 |
| 88 | 1L18 | 663 | 150, 370 | 5.3 | 1.0% | 590, 809, 370 | 8.2 | 1.5% | 590, 1026, 370 | 11.7 | 3.4% | 12 |
| 89 | 1L18 | 785 | 151, 371 | 8.6 | 1.0% | 591, 810, 371 | 11.7 | 2.8% | 591, 1027, 371 | 21.1 | 9.1% | 12 |
| 90 | 1L18 | 918 | 152, 372 | 13.9 | 1.6% | 592, 811, 372 | 15.0 | 3.0% | 592, 1028, 372 | 30.4 | 3.6% | 11 |
| 91 | 1L6 | 24 | 153, 373 | 22.6 | 1.7% | 593, 812, 373 | 45.7 | 7.8% | 593, 1029, 373 | 47.8 | 4.5% | 13 |
| 92 | 1L6 | 74 | 154, 374 | 52.5 | 12.6% | 594, 813, 374 | 56.4 | 7.1% | 594, 1030, 374 | 88.3 | 15.5% | 12 |
| 93 | 1L6 | 160 | 155, 375 | 49.8 | 7.8% | 595, 814, 375 | 50.6 | 6.1% | 595, 1031, 375 | 68.3 | 9.4% | 14 |
| 94 | 1L6 | 370 | 156, 376 | 44.7 | 8.2% | 596, 815, 376 | 52.5 | 4.2% | 596, 1032, 376 | 74.3 | 9.3% | 13 |
| 95 | 1L6 | 451 | 157, 377 | 39.3 | 5.0% | 597, 816, 377 | 35.6 | 4.1% | 597, 1033, 377 | 66.6 | 7.1% | 13 |
| 96 | 1L6 | 481 | 158, 378 | 68.3 | 8.1% | 598, 817, 378 | 78.7 | 15.6% | 598, 1034, 378 | 63.2 | 6.2% | 11 |
| 97 | 1L6 | 710 | 159, 379 | 29.2 | 4.2% | 599, 818, 379 | 32.0 | 4.1% | 599, 1035, 379 | 77.3 | 11.4% | 12 |
| 98 | 1L6 | 822 | 160, 380 | 73.7 | 11.0% | 600, 819, 380 | 72.2 | 11.6% | 600, 1036, 380 | 85.2 | 13.3% | 12 |
| 99 | 1L6 | 836 | 161, 381 | 98.8 | 21.8% | 601, 820, 381 | 95.0 | 13.2% | 601, 1037, 381 | 90.5 | 15.6% | 13 |
| 100 | 1L6 | 960 | 162, 382 | 31.1 | 4.4% | 602, 821, 382 | 20.5 | 6.1% | 602, 1038, 382 | 25.6 | 2.4% | 12 |
| 101 | MAP2K1 | 1237 | 163, 383 | 21.0 | 3.3% | 603, 822, 383 | 27.9 | 3.8% | 603, 1039, 383 | 50.0 | 8.8% | 11 |
| 102 | MAP2K1 | 1342 | 164, 384 | 3.9 | 0.5% | 604, 823, 384 | 8.7 | 1.5% | 604, 1040, 384 | 11.4 | 1.3% | 13 |
| 103 | MAP2K1 | 1501 | 165, 385 | 12.9 | 1.9% | 605, 824, 385 | 19.4 | 2.9% | 605, 1041, 385 | 19.7 | 5.3% | 12 |
| 104 | MAP2K1 | 1542 | 166, 386 | 7.2 | 1.3% | 606, 825, 386 | 11.7 | 2.1% | 606, 1042, 386 | 18.7 | 3.2% | 11 |
| 105 | MAP2K1 | 1544 | 167, 387 | 13.1 | 2.1% | 607, 826, 387 | 11.1 | 1.1% | 607, 1043, 387 | 16.5 | 3.0% | 10 |
| 106 | MAP2K1 | 1728 | 168, 388 | 11.9 | 1.7% | 608, 827, 388 | 11.9 | 1.0% | 608, 1044, 388 | 27.9 | 4.3% | 13 |
| 107 | MAP2K1 | 1777 | 169, 389 | 18.3 | 2.8% | 609, 828, 389 | 37.2 | 4.3% | 609, 1045, 389 | 64.5 | 8.5% | 13 |
| 108 | MAP2K1 | 1892 | 170, 390 | 345 | 4.7% | 610, 829, 390 | 37.6 | 6.8% | 610, 1046, 390 | 42.4 | 7.3% | 12 |
| 109 | MAP2K1 | 1954 | 171, 391 | 4.6 | 0.5% | 611, 830, 391 | 4.2 | 0.5% | 611, 1047, 391 | 6.5 | 1.1% | 13 |
| 110 | MAP2K1 | 2062 | 172, 392 | 10.2 | 0.8% | 612, 831, 392 | 10.4 | 2.9% | 612, 1048, 392 | 12.2 | 2.0% | 12 |
| 111 | MAPK1 | 3683 | 173, 393 | 7.0 | 0.9% | 613, 614, 393 | 24.4 | 17.3% | 613, 1049, 393 | 25.2 | 2.6% | 12 |
| 112 | MAPK1 | 3695 | 174, 394 | 32.9 | 4.6% | 614, 832, 394 | 30.9 | 4.0% | 614, 1050, 394 | 33.8 | 3.1% | 13 |
| 113 | MAPK1 | 3797 | 175, 395 | 7.4 | 1.1% | 615, 833, 395 | 6.4 | 1.3% | 615, 1051, 395 | 40.4 | 5.8% | 11 |
| 114 | MAPK1 | 3905 | 176, 396 | 8.0 | 1.0% | 616, 834, 396 | 8.1 | 0.5% | 616, 1052, 396 | 14.8 | 1.4% | 12 |
| 115 | MAPK1 | 3916 | 177, 397 | 11.0 | 1.7% | 617, 835, 397 | 16.0 | 3.3% | 617, 1053, 397 | 45.5 | 8.1% | 10 |
| 116 | MAPK1 | 3943 | 178, 398 | 6.8 | 0.8% | 618, 836, 398 | 6.6 | 0.7% | 618, 1054, 398 | 1.0 | 2.3% | 10 |
| 117 | MAPK1 | 4121 | 179, 399 | 7.6 | 1.1% | 619, 837, 399 | 12.7 | 1.6% | 619, 1055, 399 | 25.1 | 3.1% | 12 |
| 118 | MAPK1 | 4256 | 180, 400 | 27.6 | 2.5% | 620, 838, 400 | 36.8 | 4.0% | 620, 1056, 400 | 57.7 | 7.0% | 13 |
| 119 | MAPK1 | 4294 | 181, 401 | 31.0 | 3.0% | 621, 839, 401 | 22.3 | 3.6% | 621, 1057, 401 | 50.9 | 4.6% | 12 |
| 120 | MAPK1 | 4375 | 182, 402 | 10.9 | 1.1% | 622, 840, 402 | 12.4 | 1.4% | 622, 1058, 402 | 16.9 | 2.7% | 11 |
| 121 | MAPK14 | 2715 | 183, 403 | 11.4 | 2.8% | 623, 841, 403 | 16.5 | 4.1% | 623, 1059, 403 | 16.6 | 2.4% | 12 |
| 122 | MAPK14 | 2737 | 184, 404 | 7.5 | 0.8% | 624, 842, 404 | 10.3 | 1.1% | 624, 1060, 404 | 13.1 | 1.2% | 11 |
| 123 | MAPK14 | 2750 | 185, 405 | 8.7 | 1.0% | 625, 843, 405 | 12.2 | 1.8% | 625, 1061, 405 | 15.8 | 1.9% | 13 |
| 124 | MAPK14 | 2817 | 186, 406 | 6.4 | 0.8% | 626, 844, 406 | 14.6 | 1.7% | 626, 1062, 406 | 19.4 | 2.0% | 11 |
| 125 | MAPK14 | 3091 | 187, 407 | 9.9 | 0.6% | 627, 845, 407 | 10.3 | 1.3% | 627, 1063, 407 | 24.7 | 1.5% | 11 |
| 126 | MAPK14 | 3312 | 188, 408 | 20.4 | 1.8% | 628, 846, 408 | 30.5 | 2.9% | 628, 1064, 408 | 38.5 | 3.4% | 13 |
| 127 | MAPK14 | 3346 | 189, 409 | 20.9 | 1.6% | 629, 847, 409 | 23.0 | 2.6% | 629, 1065, 409 | 58.3 | 6.7% | 11 |
| 128 | MAPK14 | 3531 | 190, 410 | 42.4 | 3.2% | 630, 848, 410 | 55.1 | 5.0% | 630, 1066, 410 | 61.9 | 3.6% | 12 |
| 129 | MAPK14 | 3621 | 191, 411 | 28.6 | 1.9% | 631, 849, 411 | 42.4 | 13.5% | 631, 1067, 411 | 71.9 | 5.2% | 11 |
| 130 | MAPK14 | 3680 | 192, 412 | 15.6 | 1.3% | 632, 850, 412 | 15.5 | 1.9% | 632, 1068, 412 | 19.8 | 2.1% | 12 |
| 131 | PDGFA | 1322 | 193, 413 | 23.7 | 3.6% | 633, 851, 413 | 31.6 | 4.3% | 633, 1069, 413 | 38.4 | 3.3% | 12 |
| 132 | PDGFA | 1332 | 194, 414 | 35.5 | 5.4% | 634, 852, 414 | 48.4 | 3.0% | 634, 1070, 414 | 65.4 | 10.5% | 14 |
| 133 | PDGFA | 1395 | 195, 415 | 25.9 | 3.3% | 635, 853, 415 | 40.2 | 6.0% | 635, 1071, 415 | 55.2 | 9.8% | 14 |
| 134 | PDGFA | 1669 | 196, 416 | 40.4 | 5.1% | 636, 854, 416 | 29.5 | 4.3% | 636, 1072, 416 | 33.9 | 5.9% | 12 |
| 135 | PDGFA | 1676 | 197, 417 | 27.1 | 2.5% | 637, 855, 417 | 36.8 | 4.5% | 637, 1073, 417 | 47.4 | 3.4% | 13 |
| 136 | PDGFA | 1748 | 198, 418 | 27.4 | 4.7% | 638, 856, 418 | 34.5 | 5.0% | 638, 1074, 418 | 47.5 | 4.7% | 11 |
| 137 | PDGFA | 2020 | 199, 419 | 31.6 | 6.6% | 639, 857, 419 | 37.5 | 4.3% | 639, 1075, 419 | 51.9 | 5.0% | 13 |
| 138 | PDGFA | 2021 | 200, 420 | 16.7 | 1.0% | 640, 858, 420 | 24.2 | 3.1% | 640, 1076, 420 | 62.6 | 6.9% | 14 |
| 139 | PDGFA | 2030 | 201, 421 | 38.7 | 6.2% | 641, 859, 421 | 47.0 | 10.5% | 641, 1077, 421 | 80.5 | 7.6% | 13 |
| 140 | PDGFA | 2300 | 202, 422 | 55.3 | 7.7% | 642, 860, 422 | 41.2 | 4.7% | 642, 1078, 422 | 71.7 | 9.1% | 15 |
| 141 | PDGFRA | 4837 | 203, 423 | 16.9 | 3.1% | 643, 861, 423 | 21.1 | 5.1% | 643, 1079, 423 | 23.1 | 4.8% | 12 |
| 142 | PDGFRA | 4900 | 204, 424 | 23.8 | 3.8% | 644, 862, 424 | 40.9 | 8.4% | 644, 1080, 424 | 62.5 | 12.5% | 16 |
| 143 | PDGFRA | 5007 | 205, 425 | 52.6 | 9.4% | 645, 863, 425 | 49.6 | 7.7% | 645, 1081, 425 | 47.0 | 9.5% | 12 |
| 144 | PDGFRA | 5043 | 206, 426 | 30.1 | 7.9% | 646, 864, 426 | 30.0 | 5.4% | 646, 1082, 426 | 57.3 | 7.8% | 11 |
| 145 | PDGFRA | 5082 | 207, 427 | 8.3 | 1.1% | 647, 865, 427 | 11.9 | 1.8% | 647, 1083, 427 | 18.2 | 4.0% | 13 |
| 146 | PDGFRA | 5352 | 208, 428 | 6.3 | 1.4% | 648, 866, 428 | 8.2 | 1.6% | 648, 1084, 428 | 7.9 | 1.1% | 12 |
| 147 | PDGFRA | 5367 | 209, 429 | 19.1 | 5.6% | 649, 867, 429 | 10.9 | 1.6% | 649, 1085, 429 | 25.1 | 2.9% | 14 |
| 148 | PDGFRA | 5496 | 210, 430 | 18.9 | 5.4% | 650, 868, 430 | 17.0 | 2.9% | 650, 1086, 430 | 17.8 | 4.0% | 12 |
| 149 | PDGFRA | 5706 | 211, 431 | 24.5 | 4.0% | 651, 869, 431 | 47.8 | 4.3% | 651, 1087, 431 | 50.6 | 5.5% | 13 |
| 150 | PDGFRA | 5779 | 212, 432 | 13.0 | 1.4% | 652, 870, 432 | 14.0 | 2.1% | 652, 1088, 432 | 17.2 | 4.3% | 14 |
| 151 | PIK3CA | 213 | 213, 433 | 4.3 | 1.0% | 653, 871, 433 | 3.7 | 0.6% | 653, 1089, 433 | 5.7 | 0.9% | 12 |
| 152 | PIK3CA | 389 | 214, 434 | 5.3 | 1.0% | 654, 872, 434 | 7.0 | 1.5% | 654, 1090, 434 | 5.6 | 1.5% | 10 |
| 153 | PIK3CA | 517 | 215, 435 | 9.6 | 1.1% | 655, 873, 435 | 11.5 | 2.1% | 655, 1091, 435 | 13.5 | 1.6% | 11 |
| 154 | PIK3CA | 630 | 216, 436 | 6.1 | 1.2% | 656, 874, 436 | 8.9 | 2.6% | 656, 1092, 436 | 9.3 | 1.8% | 12 |
| 155 | PIK3CA | 680 | 217, 437 | 3.8 | 0.3% | 657, 875, 437 | 5.9 | 0.6% | 657, 1093, 437 | 6.9 | 1.0% | 11 |
| 156 | PIK3CA | 732 | 218, 438 | 5.7 | 1.7% | 658, 876, 438 | 15.3 | 1.5% | 658, 1094, 438 | 17.4 | 4.0% | 11 |
| 157 | PIK3CA | 736 | 219, 439 | 5.9 | 0.9% | 659, 877, 439 | 7.8 | 1.1% | 659, 1095, 439 | 6.5 | 1.4% | 12 |
| 158 | PIK3CA | 923 | 220, 440 | 5.0 | 0.7% | 660, 878, 440 | 8.5 | 1.5% | 660, 1096, 440 | 7.4 | 0.6% | 12 |
| 159 | PIK3CA | 1087 | 221, 441 | 8.1 | 2.3% | 661, 879, 441 | 8.5 | 1.6% | 661, 1097, 441 | 17.5 | 4.9% | 12 |
| 160 | PIK3CA | 1094 | 222, 442 | 13.0 | 3.8% | 662, 880, 442 | 13.0 | 2.5% | 662, 1098, 442 | 30.1 | 6.4% | 11 |
| 161 | PKN3 | 2408 | 223, 443 | 9.4 | 2.1% | 663, 881, 443 | 15.2 | 3.7% | 663, 665, 443 | 32.1 | 6.6% | 12 |
| 162 | PKN3 | 2420 | 224, 444 | 14.5 | 1.7% | 664, 882, 444 | 30.4 | 7.5% | 664, 1099, 444 | 40.1 | 6.7% | 12 |
| 163 | PKN3 | 2421 | 225, 445 | 15.2 | 2.0% | 665, 883, 445 | 20.6 | 2.7% | 665, 1100, 445 | 50.8 | 7.8% | 12 |
| 164 | PKN3 | 2425 | 226, 446 | 28.4 | 3.8% | 666, 884, 446 | 27.0 | 6.9% | 666, 1101, 446 | 36.2 | 4.8% | 15 |
| 165 | PKN3 | 2682 | 227, 447 | 30.0 | 4.6% | 667, 885, 447 | 27.1 | 2.8% | 667, 1102, 447 | 37.1 | 6.2% | 11 |
| 166 | PKN3 | 2683 | 228, 448 | 22.4 | 2.8% | 668, 886, 448 | 34.8 | 2.2% | 668, 1103, 448 | 51.9 | 7.4% | 12 |
| 167 | PKN3 | 2931 | 229, 449 | 35.1 | 4.4% | 669, 887, 449 | 57.3 | 7.8% | 669, 1104, 449 | 88.6 | 7.1% | 13 |
| 168 | PKN3 | 3063 | 230, 450 | 21.8 | 3.1% | 670, 888, 450 | 28.6 | 8.5% | 670, 1105, 450 | 40.5 | 6.2% | 12 |
| 169 | PKN3 | 3314 | 231, 451 | 9.7 | 1.8% | 671, 889, 451 | 12.0 | 1.4% | 671, 1106, 451 | 17.3 | 1.3% | 10 |
| 170 | PKN3 | 3315 | 232, 452 | 10.1 | 1.3% | 672, 890, 452 | 15.3 | 2.8% | 672, 1107, 452 | 37.4 | 3.6% | 11 |
| 171 | RAF1 | 1509 | 233, 453 | 46.2 | 9.4% | 673, 891, 453 | 51.3 | 10.7% | 673, 1108, 453 | 61.3 | 4.4% | 12 |
| 172 | RAF1 | 1512 | 234, 454 | 40.1 | 9.7% | 674, 892, 454 | 34.5 | 5.6% | 674, 1109, 454 | 62.4 | 8.6% | 13 |
| 173 | RAF1 | 1628 | 235, 455 | 48.3 | 7.9% | 675, 893, 455 | 47.4 | 7.1% | 675, 1110, 455 | 41.1 | 5.1% | 12 |
| 174 | RAF1 | 1645 | 236, 456 | 38.9 | 2.3% | 676, 894, 456 | 62.1 | 9.0% | 676, 1111, 456 | 85.0 | 9.3% | 13 |
| 175 | RAF1 | 1780 | 237, 457 | 22.6 | 4.9% | 677, 895, 457 | 24.8 | 5.3% | 677, 1112, 457 | 37.6 | 10.4% | 12 |
| 176 | RAF1 | 1799 | 238, 458 | 23.2 | 3.1% | 678, 896, 458 | 43.6 | 7.6% | 678, 1113, 458 | 50.7 | 6.2% | 12 |
| 177 | RAF1 | 1807 | 239, 459 | 28.0 | 5.4% | 679, 897, 459 | 34.8 | 5.8% | 679, 1114, 459 | 37.0 | 5.3% | 15 |
| 178 | RAF1 | 1863 | 240, 460 | 28.2 | 3.1% | 680, 898, 460 | 38.1 | 4.5% | 680, 1115, 460 | 35.7 | 4.2% | 14 |
| 179 | RAF1 | 2157 | 241, 461 | 68.8 | 6.5% | 681, 899, 461 | 64.1 | 8.0% | 681, 1116, 461 | 86.7 | 12.6% | 14 |
| 180 | RAF1 | 2252 | 242, 462 | 11.4 | 1.7% | 682, 900, 462 | 25.8 | 5.4% | 682, 1117, 462 | 71.2 | 10.7% | 13 |
| 181 | SRD5A1 | 1150 | 243, 463 | 3.7 | 0.5% | 683, 901, 463 | 4.4 | 0.7% | 683, 1118, 463 | 3.8 | 0.4% | 12 |
| 182 | SRD5A1 | 1153 | 244, 464 | 3.2 | 0.4% | 684, 902, 464 | 5.2 | 0.5% | 684, 1119, 464 | 7.0 | 0.9% | 12 |
| 183 | SRD5A1 | 1845 | 245, 465 | 3.9 | 0.5% | 685, 903, 465 | 4.5 | 0.6% | 685, 1120, 465 | 7.4 | 0.8% | 13 |
| 184 | SRD5A1 | 1917 | 246, 466 | 9.4 | 0.8% | 686, 904, 466 | 10.2 | 1.3% | 686, 1121, 466 | 22.0 | 2.8% | 12 |
| 185 | SRD5A1 | 1920 | 247, 467 | 4.6 | 0.3% | 687, 905, 467 | 4.9 | 1.0% | 687, 1122, 467 | 6.4 | 0.5% | 11 |
| 186 | SRD5A1 | 1964 | 248, 468 | 6.2 | 0.7% | 688, 906, 468 | 10.4 | 0.7% | 688, 1123, 468 | 21.0 | 4.6% | 10 |
| 187 | SRD5A1 | 1981 | 249, 469 | 6.5 | 1.0% | 689, 907, 469 | 7.1 | 0.7% | 689, 1124, 469 | 8.8 | 1.5% | 12 |
| 188 | SRD5A1 | 2084 | 250, 470 | 16.9 | 1.1% | 690, 908, 470 | 15.7 | 1.5% | 690, 1125, 470 | 13.3 | 1.5% | 12 |
| 189 | SRD5A1 | 2085 | 251, 471 | 17.3 | 1.6% | 691, 909, 471 | 19.4 | 1.7% | 691, 1126, 471 | 20.8 | 2.6% | 12 |
| 190 | SRD5A1 | 2103 | 252, 472 | 7.5 | 1.3% | 692, 910, 472 | 10.9 | 1.2% | 692, 1127, 472 | 12.3 | 1.7% | 12 |
| 191 | TNF | 32 | 253, 473 | 71.4 | 13.2% | 693, 911, 473 | 93.7 | 14.9% | 693, 1128, 473 | 122.6 | 21.1% | 12 |
| 192 | TNF | 649 | 254, 474 | 100.0 | 16.3% | 694, 912, 474 | 127.7 | 12.6% | 694, 1129, 474 | 147.9 | 21.7% | 12 |
| 193 | TNF | 802 | 255, 475 | 67.2 | 10.7% | 695, 913, 475 | 64.0 | 6.6% | 695, 1130, 475 | 116.4 | 21.0% | 12 |
| 194 | TNF | 875 | 256, 476 | 101.7 | 19.9% | 696, 914, 476 | 99.3 | 15.5% | 696, 1131, 476 | 108.8 | 14.2% | 12 |
| 195 | TNF | 983 | 257, 477 | 94.5 | 7.0% | 697, 915, 477 | 83.1 | 7.3% | 697, 1132, 477 | 140.6 | 20.4% | 11 |
| 196 | TNF | 987 | 258, 478 | 82.0 | 10.9% | 698, 916, 478 | 139.4 | 8.2% | 698, 1133, 478 | 143.8 | 9.2% | 10 |
| 197 | TNF | 992 | 259, 479 | 126.7 | 15.8% | 699, 700, 479 | 121.7 | 10.8% | 699, 1134, 479 | 115.9 | 16.4% | 11 |
| 198 | TNF | 1003 | 260, 480 | 123.4 | 16.7% | 700, 917, 480 | 114.4 | 47.8% | 700, 1135, 480 | 98.5 | 17.2% | 14 |
| 199 | TNF | 1630 | 261, 481 | 58.0 | 5.7% | 701, 918, 481 | 56.1 | 9.4% | 701, 1136, 481 | 71.0 | 17.2% | 11 |
| 200 | TNF | 1631 | 262, 482 | 54.2 | 13.4% | 702, 919, 482 | 63.9 | 10.1% | 702, 1137, 482 | 73.8 | 14.8% | 11 |
| 201 | TNFSF13B | 188 | 263, 483 | 20.4 | 3.2% | 703, 920, 483 | 46.2 | 11.9% | 703, 1138, 483 | 58.4 | 12.7% | 13 |
| 202 | TNFSF13B | 313 | 264, 484 | 15.9 | 5.1% | 704, 921, 484 | 18.9 | 7.4% | 704, 1139, 484 | 48.0 | 8.1% | 12 |
| 203 | TNFSF13B | 337 | 265, 485 | 22.3 | 4.6% | 705, 922, 485 | 37.1 | 11.0% | 705, 1140, 485 | 63.6 | 10.4% | 12 |
| 204 | TNFSF13B | 590 | 266, 486 | 35.8 | 8.7% | 706, 923, 486 | 49.4 | 11.0% | 706, 1141, 486 | 50.7 | 10.3% | 10 |
| 205 | TNFSF13B | 652 | 267, 487 | 21.3 | 7.2% | 707, 924, 487 | 57.6 | 16.7% | 707, 1142, 487 | 78.8 | 5.6% | 14 |
| 206 | TNFSF13B | 661 | 268, 488 | 28.8 | 3.0% | 708, 925, 488 | 38.3 | 8.4% | 708, 1143, 488 | 56.5 | 16.3% | 12 |
| 207 | TNFSF13B | 684 | 269, 489 | 46.3 | 7.2% | 709, 926, 489 | 43.8 | 9.7% | 709, 1144, 489 | 54.5 | 4.6% | 12 |
| 208 | TNFSF13B | 905 | 270, 490 | 18.5 | 5.0% | 710, 927, 490 | 27.9 | 3.1% | 710, 1145, 490 | 51.7 | 10.9% | 12 |
| 209 | TNFSF13B | 961 | 271, 491 | 21.4 | 4.0% | 711, 928, 491 | 37.5 | 10.1% | 711, 1146, 491 | 77.6 | 11.2% | 14 |
| 210 | TNFSF13B | 1150 | 272, 492 | 24.1 | 7.0% | 712, 929, 492 | 23.4 | 5.7% | 712, 1147, 492 | 35.9 | 8.0% | 13 |
| 211 | VEGFA | 1426 | 273, 493 | 14.5 | 2.2% | 713, 930, 493 | 18.1 | 3.2% | 713, 1148, 493 | 21.0 | 3.8% | 13 |
| 212 | VEGFA | 1428 | 274, 494 | 18.5 | 2.6% | 714, 931, 494 | 32.1 | 5.8% | 714, 1149, 494 | 46.7 | 9.4% | 12 |
| 213 | VEGFA | 1603 | 275, 495 | 14.6 | 2.1% | 715, 932, 495 | 36.6 | 17.5% | 715, 1150, 495 | 65.6 | 6.9% | 13 |
| 214 | VEGFA | 1685 | 276, 496 | 17.1 | 1.3% | 716, 933, 496 | 20.2 | 5.5% | 716, 1151, 496 | 23.4 | 3.8% | 13 |
| 215 | VEGFA | 1792 | 277, 497 | 17.0 | 1.8% | 717, 934, 497 | 21.2 | 3.2% | 717, 1152, 497 | 39.5 | 6.3% | 12 |
| 216 | VEGFA | 2100 | 278, 498 | 116.9 | 11.5% | 718, 935, 498 | 103.6 | 7.5% | 718, 1153, 498 | 101.5 | 12.9% | 12 |
| 217 | VEGFA | 2102 | 279, 499 | 116.3 | 9.1% | 719, 936, 499 | 110.2 | 9.3% | 719, 1154, 499 | 105.0 | 8.0% | 12 |
| 218 | VEGFA | 2196 | 280, 500 | 24.2 | 2.7% | 720, 937, 500 | 26.6 | 3.1% | 720, 1155, 500 | 43.5 | 3.5% | 12 |
| 219 | VEGFA | 2261 | 281, 501 | 15.6 | 2.2% | 721, 938, 501 | 44.2 | 6.2% | 721, 1156, 501 | 109.0 | 9.8% | 12 |
| 220 | VEGFA | 2292 | 282, 502 | 48.4 | 4.3% | 722, 939, 502 | 45.1 | 7.2% | 722, 1157, 502 | 80.7 | 6.7% | 15 |

*All samples were normalized to the respective dsRNA QNeg (Qiagen) negative control samples run in the same experiment. That is, QNeg values were set as 100% active (i.e., no knockdown), with 95% confidence intervals (CI) ranging from 6.3-22.5%. As a positive control, an siRNA specific for rLuc was used, which samples showed on average expression levels that varied from 1.2% to 16.8% (i.e., about 83% to about 99% knockdown activity and a 95% CI ranging from 0.3% to 13.7%).
†“Pos” refers to the position on the target gene mRNA message that aligns with the 5′-end of the dsRNA sense strand. The mRNA numbering is based on the GenBank accession numbers as described herein.
‡The SEQ ID NOS. are provided in the following order: (1) Dicer: sense strand, antisense strand; (2) Nicked: 5′-sense strand fragment, 3′-sense strand fragment, and antisense strand; and (3) Gapped: 5′-sense strand fragment, 3′-sense strand fragment, and antisense strand. The Dicer dsRNA has two strands, while ndsRNA and gdsRNA have three strands each. The nicked or gapped sense strand fragments have three locked nucleic acids each.
\hat{ }“Length 5′-S” refers to the length of the 5′-sense strand fragment of the nicked or gapped mdRNA, which indicates the position of the nick (e.g., 10 means the nick is between position 10 and 11, so the 5′sense strand fragment is 10 nucleotides long and the 3′-sense strand fragment is 15 nucelotides long) or one nucleotide gap (e.g., 10 means the missing nucleotide is number 11, so the 5′sense strand fragment is 10 nucleotides long and the 3′-sense strand fragment is 14 nucelotides long).

### Example 2

### Knockdown of β-Galactosidase Activity by Gapped dsRNA Dicer Substrate

[0190] The activity of a Dicer substrate dsRNA containing a gap in the double-stranded structure in silencing LacZ mRNA as compared to the normal Dicer substrate dsRNA (i.e., not having a gap) was examined.

Nucleotide Sequences of dsRNA and mdRNA Targeting LacZ mRNA

[0191] The nucleic acid sequence of the one or more sense strands, and the antisense strand of the dsRNA and gapped dsRNA (also referred to herein as a meroduplex or mdRNA) are shown below and were synthesized using standard techniques. The RISC activator LacZ dsRNA comprises a 21 nucleotide sense strand and a 21 nucleotide antisense strand, which can anneal to form a double-stranded region of 19 base pairs with a two deoxythymidine overhang on each strand (referred to as 21/21 dsRNA).

| LacZ dsRNA (21/21)-RISC Activator | |
|---|---|
| Sense | |
| 5′-CUACACAAAUCAGCGAUUUdTdT-3′ | (SEQ ID NO: 1) |
| Antisense | |
| 3′-dTdTGAUGUGUUUAGUCGCUAAA-5′ | (SEQ ID NO: 2) |

[0192] The Dicer substrate LacZ dsRNA comprises a 25 nucleotide sense strand and a 27 nucleotide antisense strand, which can anneal to form a double-stranded region of 25 base pairs with one blunt end and a cytidine and uridine overhang on the other end (referred to as 25/27 dsRNA).

LacZ dsRNA (25/27)-Dicer Substrate

| | |
|---|---|
| Sense | |
| 5′-CUACACAAAUCAGCGAUUUCCAUdGdT-3′ | (SEQ ID NO: 3) |
| Antisense | |
| 3′-CUGAUGUGUUUAGUCGCUAAAGGUA C A-5′ | (SEQ ID NO: 4) |

The LacZ mdRNA comprises two sense strands of 13 nucleotides (5′-portion) and 11 nucleotides (3′-portion) and a 27 nucleotide antisense strand, which three strands can anneal to form two double-stranded regions of 13 and 11 base pairs separated by a single nucleotide gap (referred to as a 13, 11/27 mdRNA). The 5′-end of the 11 nucleotide sense strand fragment may be optionally phosphorylated. The “*” indicates a gap—in this case, a single nucleotide gap (i.e., a cytidine is missing).

LacZ mdRNA (13, 11/27)-Dicer Substrate

(SEQ ID NOS: 5, 6)

| | |
|---|---|
| Sense | 5′-CUACACAAAUCAG*GAUUUCCAUdGdT-3′ |

(SEQ ID NO: 4)

| | |
|---|---|
| Antisense | 3′-CUGAUGUGUUUAGUCGCUAAAGGUA C A-5′ |

Each of the LacZ dsRNA or mdRNA was used to transfect 9lacZ/R cells.

### Transfection

[0193] Six well collagen-coated plates were seeded with 5×10⁵ 9lacZ/R cells/well in a 2 ml volume per well, and incubated overnight at 37° C./5% CO₂ in DMEM/high glucose media. Preparation for transfection: 250 μl of OPTIMEM media without serum was mixed with 5 μl of 20 pmol/μl dsRNA and 5 μl of HIPERFECT transfection solution (Qiagen) was mixed with another 250 μl OPTIMEM media. After both mixtures were allowed to equilibrate for 5 minutes, the RNA and transfection solutions were combined and left at room temperature for 20 minutes to form transfection complexes. The final concentration of HIPERFECT was 50 μM, and the dsRNAs were tested at 0.05 nM, 0.1 nM, 0.2 nM, 0.5 nM, 1 nM, 2 nM, 5 nM, and 10 nM, while the mdRNA was tested at 0.2 nM, 0.5 nM, 1 nM, 2 nM, 5 nM, 10 nM, 20 nM, and 50 nM. Complete media was removed, the cells were washed with incomplete OPTIMEM, and then 500 μl transfection mixture was applied to the cells, which were incubated with gentle shaking at 37° C. for 4 hours. After transfecting, the transfection media was removed, cells were washed once with complete DMEM/high glucose media, fresh media added, and the cells were then incubated for 48 hours at 37° C., 5% CO₂.

### β-Galactosidase Assay

[0194] Transfected cells were washed with PBS, and then detached with 0.5 ml trypsin/EDTA. The detached cells were suspended in 1 ml complete DMEM/high glucose and transferred to a clean tube. The cells were harvested by centrifugation at 250×g for 5 minutes, and then resuspended in 50 μl 1× lysis buffer at 4° C. The lysed cells were subjected to two freeze-thaw cycles on dry ice and a 37° C. water bath. The lysed samples were centrifuged for 5 minutes at 4° C. and the supernatant was recovered. For each sample, 1.5 μl and 10 μl of lysate was transferred to a clean tube and sterile water added to a final volume of 30 μl followed by the addition of 70 μl o-nitrophenyl-β-D-galactopyranose (ONPG) and 200 μl 1× cleavage buffer with β-mercaptoethanol. The samples were mixed briefly, incubated for 30 minutes at 37° C., and then 500 μl stop buffer was added (final volume 800 μl). β-Galactosidase activity for each sample was measured in disposable cuvettes at 420 nm. Protein concentration was determined by the BCA (bicinchoninic acid) method. For the purpose of the instant example, the level of measured LacZ activity was correlated with the quantity of LacZ transcript within 9L/LacZ cells. Thus, a reduction in β-galactosidase activity after dsRNA transfection, absent a negative impact on cell viability, was attributed to a reduction in the quantity of LacZ transcripts resulting from targeted degradation mediated by the LacZ dsRNA.

### Results

[0195] Knockdown activity in transfected and untransfected cells was normalized to a Qneg control dsRNA and presented as a normalized value of the Qneg control (i.e., Qneg represented 100% or “normal” gene expression levels). Both the lacZ RISC activator and Dicer substrate dsRNAs molecule showed good knockdown of β-galactosidase activity at concentration as low as 0.1 nM (FIG. 2), while the Dicer substrate antisense strand alone (single stranded 27mer) had no silencing effect. Surprisingly, a gapped mdRNA showed good knockdown although somewhat lower than that of intact RISC activator and Dicer substrate dsRNAs (FIG. 2). The presence of the gapmer cytidine (i.e., the missing nucleotide) at various concentrations (0.1 μM to 50 μM) had no effect on the activity of the mdRNA (data not shown). None of the dsRNA or mdRNA solutions showed any detectable toxicity in the transfected 9L/LacZ cells. The IC₅₀ of the lacZ mdRNA was calculated to be 3.74 nM, which is about 10 fold lower than what had been previously measured for lacZ dsRNA 21/21 (data not shown). These results show that a meroduplex (gapped dsRNA) is capable of inducing gene silencing.

### Example 3

### Knockdown of Influenza Gene Expression by Nicked dsRNA

[0196] The activity of a nicked dsRNA (21/21) in silencing influenza gene expression as compared to a normal dsRNA (i.e., not having a nick) was examined.

Nucleotide Sequences of dsRNA and mdRNA Targeting Influenza mRNA

[0197] The dsRNA and nicked dsRNA (another form of meroduplex, referred to herein as ndsRNA) are shown below and were synthesized using standard techniques. The RISC activator influenza G1498 dsRNA comprises a 21 nucleotide sense strand and a 21 nucleotide antisense strand, which can anneal to form a double-stranded region of 19 base pairs with a two deoxythymidine overhang on each strand.

| G1498-wt dsRNA (21/21) | |
|---|---|
| Sense | |
| 5′-GGAUCUUAUUUCUUCGGAGdTdT-3′ | (SEQ ID NO: 7) |
| Antisense | |
| 3′-dTdTCCUAGAAUAAAGAAGCCUC-5′ | (SEQ ID NO: 8) |

[0198] The RISC activator influenza G1498 dsRNA was nicked on the sense strand after nucleotide 11 to produce a ndsRNA having two sense strands of 11 nucleotides (5′-portion, italic) and 10 nucleotides (3′-portion) and a 21 nucleotide antisense strand, which three strands can anneal to form two double-stranded regions of 11 (shown in italics) and 10 base pairs separated by a one nucleotide gap (which may be referred to as G1498 11, 10/21 ndsRNA-wt). The 5′-end of the 10 nucleotide sense strand fragment may be optionally phosphorylated, as depicted by a “p” preceding the nucleotide (e.g., pC).

G1498 ndsRNA-wt (11, 10/21)

| | |
|---|---|
| Sense | |
| 5′-GGAUCUUAUUUCUUCGGAGdTdT-3′ | (SEQ ID NO: 9, 10) |
| Antisense | |
| 3′-dTdTCCUAGAAUAAAGAAGCCUC-5′ | (SEQ ID NO: 8) |

G1498 ndsRNA-wt (11, 10/21)

| | |
|---|---|
| Sense | |
| 5′-GGAUCUUAUUUpCUUCGGAGdTdT-3′ | (SEQ ID NOS: 9, 10) |
| Antisense | |
| 3′-dTdTCCUAGAAUAAAGAAGCCUC-5′ | (SEQ ID NO :8) |

In addition, each of these G1498 dsRNAs were made with each U substituted with a 5-methyluridine (ribothymidine) and are referred to as G1498 dsRNA-rT. Each of the G1498 dsRNA or ndsRNA (meroduplex), with or without the 5-methyluridine substitution, was used to transfect HeLa S3 cells having an influenza target sequence associated with a luciferase gene. Also, the G1498 antisense strand alone or the antisense strand annealed to the 11 nucleotide sense strand portion alone or the 10 nucleotide sense strand portion alone were examined for activity.

### Transfection and Dual Luciferase Assay

[0199] The reporter plasmid psiCHECK™-2 (Promega, Madison, Wis.), which constitutively expresses both firefly luc2 (Photinus pyralis) and Renilla (Renilla reniformis, also known as sea pansy) luciferases, was used to clone in a portion of the influenza NP gene downstream of the Renilla translational stop codon that results in a Renilla-influenza NP fusion mRNA. The firefly luciferase in the psiCHECK™-2 vector is used to normalize Renilla luciferase expression and serves as a control for transfection efficiency.

[0200] Multi-well plates were seeded with HeLa S3 cells/well in 100 μl Ham's F12 medium and 10% fetal bovine serum, and incubated overnight at 37° C./5% CO₂. The HeLa S3 cells were transfected with the psiCHECK™-influenza plasmid (75 ng) and G1498 dsRNA or ndsRNA (final concentration of 10 nM or 100 nM) formulated in Lipofectamine™ 2000 and OPTIMEM reduced serum medium. The transfection mixture was incubated with the HeLa S3 cells with gentle shaking at 37° C. for about 18 to 20 hours.

[0201] After transfecting, firefly luciferase reporter activity was measured first by adding Dual-Glo™ Luciferase Reagent (Promega, Madison, Wis.) for 10 minutes with shaking, and then quantitating the luminescent signal using a VICTOR³™ 1420 Multilabel Counter (PerkinElmer, Waltham, Mass.). After measuring the firefly luminescence, Stop & Glo® Reagent (Promega, Madison, Wis.) was added for 10 minutes with shaking to simultaneously quench the firefly reaction and initiate the Renilla luciferase reaction, and then the Renilla luciferase luminescent signal was quantitated VICTOR³™ 1420 Multilabel Counter (PerkinElmer, Waltham, Mass.).

### Results

[0202] Knockdown activity in transfected and untransfected cells was normalized to a Qneg control dsRNA and presented as a normalized value of the Qneg control (i.e., Qneg represented 100% or “normal” gene expression levels). Thus, a smaller value indicates a greater knockdown effect. The G1498 dsRNA-wt and dsRNA-rT showed similar good knockdown at a 100 nM concentration (FIG. 3). Surprisingly, the G1498 ndsRNA-rT, whether phosphorylated or not, showed good knockdown although somewhat lower than the G1498 dsRNA-wt (FIG. 3). Similar results were obtained with dsRNA or ndsRNA at 10 nM (data not shown). None of the G1498 dsRNA or ndsRNA solutions showed any detectable toxicity in HeLa S3 cells at either 10 nM or 100 nM. Even the presence of only half a nicked sense strand (an 11 nucleotide or 10 nucleotide strand alone) with a G1498 antisense strand showed some detectable activity. These results show that a nicked-type meroduplex dsRNA molecule is unexpectedly capable of promoting gene silencing.

### Example 4

### Knockdown Activity of Nicked mdRNA

[0203] In this example, the activity of a dicer substrate LacZ dsRNA of Example 1 having a sense strand with a nick at various positions was examined. In addition, a dideoxy nucleotide (i.e., ddG) was incorporated at the 5′-end of the 3′-most strand of a sense sequence having a nick or a single nucleotide gap to determine whether the in vivo ligation of the nicked sense strand is “rescuing” activity. The ddG is not a substrate for ligation. Also examined was the influenza dicer substrate dsRNA of Example 7 having a sense strand with a nick at one of positions 8 to 14. The “p” designation indicates that the 5′-end of the 3′-most strand of the nicked sense influenza sequence was phosphorylated. The “L” designation indicates that the G at position 2 of the 5′-most strand of the nicked sense influenza sequence was substituted for a locked nucleic acid G. The Qneg is a negative control dsRNA.

[0204] The dual fluorescence assay of Example 3 was used to measure knockdown activity with 5 nM of the LacZ sequences and 0.5 nM of the influenza sequences. The lacZ dicer substrate (25/27, LacZ-DS) and lacZ RISC activator (21/21, LacZ) are equally active, and the LacZ-DS can be nicked in any position between 8 and 14 without affecting activity (FIG. 3). In addition, the inclusion of a ddG on the 5′-end of the 3′-most LacZ sense sequence having a nick (LacZ:DSNkd13-3′dd) or a one nucleotide gap (LacZ:DSNkd13D1-3′dd) was essentially as active as the unsubstituted sequence (FIG. 4). The influenza dicer substrate (G1498DS) nicked at any one of positions 8 to 14 was also highly active (FIG. 5). Phosphorylation of the 5′-end of the 3′-most strand of the nicked sense influenza sequence had essentially no effect on activity, but addition of a locked nucleic acid appears to improve activity.

### Example 5

### Mean Inhibitory Concentration of mdRNA

[0205] In this example, a dose response assay was performed to measure the mean inhibitory concentration (IC₅₀) of the influenza dicer substrate dsRNA of Example 8 having a sense strand with a nick at position 12, 13, or 14, including or not a locked nucleic acid. The dual luciferase assay of Example 2 was used. The influenza dicer substrate dsRNA (G1498DS) was tested at 0.0004 nM, 0.002 nM, 0.005 nM, 0.019 nM, 0.067 nM, 0.233 nM, 0.816 nM, 2.8 nM, and 10 nM, while the mdRNA with a nick at position 13 (G1498DS:Nkd13) was tested at 0.001 nM, 0.048 nM, 0.167 nM, 1 nM, 2 nM, 7 nM, and 25 nM (see FIG. 6). Also tested were RISC activator molecules (21/21) with or without a nick at various positions (including G1498DS:Nkd11, G1498DS:Nkd12, and G1498DS:Nkd14), each of the nicked versions with a locked nucleic acid as described above (data not shown). The Qneg is a negative control dsRNA.

[0206] The IC₅₀ of the RISC activator G1498 was calculated to be about 22 pM, while the dicer substrate G1498DS IC₅₀ was calculated to be about 6 pM. The IC₅₀ of RISC and Dicer mdRNAs range from about 200 pM to about 15 nM. The inclusion of a single locked nucleic acid reduced the IC₅₀ of Dicer mdRNAs by up 4 fold (data not shown). These results show that a meroduplex dsRNA having a nick or gap in any position is capable of inducing gene silencing.

### Example 6

### Knockdown Activity of Gapped mdRNA

[0207] The activity of an influenza dicer substrate dsRNA having a sense strand with a gap of differing sizes and positions was examined. The influenza dicer substrate dsRNA of Example 8 was generated with a sense strand having a gap of 0 to 6 nucleotides at position 8, a gap of 4 nucleotides at position 9, a gap of 3 nucleotides at position 10, a gap of 2 nucleotides at position 11, and a gap of 1 nucleotide at position 12 (see Table 2). The Qneg is a negative control dsRNA. Each of the mdRNAs was tested at a concentration of 5 nM (data not shown) and 10 nM. The mdRNAs have the following antisense strand 5′-CAUUGUCUCCGAAGAAAUAAGAUCCUU (SEQ ID NO:11), and nicked or gapped sense strands as shown in Table 2.

TABLE 2

| | | | | | |
|---|---|---|---|---|---|
| | | | Gap | Gap | % |
| mdRNA | 5′ Sense* (SEQ ID NO.) | 3′ Sense (SEQ ID NO.) | Pos | Size | KD^{†} |

| | | | | | |
|---|---|---|---|---|---|
| G1498: DSNkd8 | GGAUCUUA (12) | UUUCUUCGGAGACAAdTdG (13) | 8 | 0 | 67.8 |
| G1498: DSNkd8D1 | GGAUCUUA (12) | UUCUUCGGAGACAAdTdG (14) | 8 | 1 | 60.9 |
| G1498: DSNkd8D2 | GGAUCUUA (12) | UCUUCGGAGACAAdTdG (15) | 8 | 2 | 48.2 |
| G1498: DSNkd8D3 | GGAUCUUA (12) | CUUCGGAGACAAdTdG (16) | 8 | 3 | 44.1 |
| G1498: DSNkd8D4 | GGAUCUUA (12) | UUCGGAGACAAdTdG (17) | 8 | 4 | 30.8 |
| G1498: DSNkd8D5 | GGAUCUUA (12) | UCGGAGACAAdTdG (18) | 8 | 5 | 10.8 |
| G1498: DSNkd8D6 | GGAUCUUA (12) | CGGAGACAAdTdG (19) | 8 | 6 | 17.9 |
| G1498: DSNkd9D4 | GGAUCUUAU (20) | UCGGAGACAAdTdG (18) | 9 | 4 | 38.9 |
| G1498: DSNkd10D3 | GGAUCUUAUU (21) | UCGGAGACAAdTdG (18) | 10 | 3 | 38.4 |
| G1498: DSNkd11D2 | GGAUCUUAUUU (22) | UCGGAGACAAdTdG (18) | 11 | 2 | 46.2 |
| G1498: DSNkd12D1 | GGAUCUUAUUUC (23) | UCGGAGACAAdTdG (18) | 12 | 1 | 49.6 |
| Plasmid | — | — | — | — | 5.3 |

*G indicates a locked nucleic acid G in the 5′ sense strand.
^{†}% KD means percent knockdown activity.

[0208] The dual fluorescence assay of Example 2 was used to measure knockdown activity. Similar results were obtained at both the 5 nM and 10 nM concentrations. These data show that an mdRNA having a gap of up to 6 nucleotides still has activity, although having four or fewer missing nucleotides shows the best activity (see, also, FIG. 7). Thus, mdRNA having various sizes gaps that are in various different positions have knockdown activity.

[0209] To examine the general applicability of a sequence having a sense strand with a gap of differing sizes and positions, a different dsRNA sequence was tested. The lacZ RISC dsRNA of Example 1 was generated with a sense strand having a gap of 0 to 6 nucleotides at position 8, a gap of 5 nucleotides at position 9, a gap of 4 nucleotides at position 10, a gap of 3 nucleotides at position 11, a gap of 2 nucleotides at position 12, a gap of 1 nucleotide at position 12, and a nick (gap of 0) at position 14 (see Table 3). The Qneg is a negative control dsRNA. Each of the mdRNAs was tested at a concentration of 5 nM (data not shown) and 25 nM. The lacZ mdRNAs have the following antisense strand 5′-AAAUCGCUGAUUUGUGUAGdTdTUAAA (SEQ ID NO:2) and nicked or gapped sense strands as shown in Table 3.

TABLE 3

| | | | Gap | Gap |
|---|---|---|---|---|
| mdRNA | 5′ Sense* (SEQ ID NO.) | 3′ Sense (SEQ ID NO.) | Pos | Size |
| LacZ: Nkd8 | CUACACAA (24) | AUCAGCGAUUUdTdT (25) | 8 | 0 |
| LacZ: Nkd8D1 | CUACACAA (24) | UCAGCGAUUUdTdT (26) | 8 | 1 |
| LacZ: Nkd8D2 | CUACACAA (24) | CAGCGAUUUdTdT (27) | 8 | 2 |
| LacZ: Nkd8D3 | CUACACAA (24) | AGCGAUUUdTdT (28) | 8 | 3 |
| LacZ: Nkd8D4 | CUACACAA (24) | GCGAUUUdTdT (29) | 8 | 4 |
| LacZ: Nkd8D5 | CUACACAA (24) | CGAUUUdTdT (30) | 8 | 5 |
| LacZ: Nkd8D6 | CUACACAA (24) | GAUUUdTdT (31) | 8 | 6 |
| LacZ: Nkd9D5 | CUACACAAA (32) | GAUUUdTdT (31) | 9 | 5 |
| LacZ: Nkd10D4 | CUACACAAAU (33) | GAUUUdTdT (31) | 10 | 4 |
| LacZ: Nkd11D3 | CUACACAAAUC (34) | GAUUUdTdT (31) | 11 | 3 |
| LacZ: Nkd12D2 | CUACACAAAUCA (35) | GAUUUdTdT (31) | 12 | 2 |
| LacZ: Nkd13D1 | CUACACAAAUCAG (36) | GAUUUdTdT (31) | 13 | 1 |
| LacZ: Nkd14 | CUACACAAAUCAGC (37) | GAUUUdTdT (31) | 14 | 0 |

*A indicates a locked nucleic acid A in each sense strand.

[0210] The dual fluorescence assay of Example 3 was used to measure knockdown activity. FIG. 8 shows that an mdRNA having a gap of up to 6 nucleotides has substantial activity and the position of the gap may affect the potency of knockdown. Thus, mdRNA having various sizes gaps that are in various different positions and in different mdRNA sequences have knockdown activity.

### Example 7

### Knockdown Activity of Substituted mdRNA

[0211] The activity of an influenza dsRNA RISC sequences having a nicked sense strand and the sense strands having locked nucleic acid substitutions were examined. The influenza RISC sequence G1498 of Example 3 was generated with a sense strand having a nick at positions 8 to 14 counting from the 5′-end. Each sense strand was substituted with one or two locked nucleic acids as shown in Table 4. The Qneg and Plasmid are negative controls. Each of the mdRNAs was tested at a concentration of 5 nM. The antisense strand used was 5′-CUCCGAAGAAAUAAGAUCCdTdT (SEQ ID NO:8).

TABLE 4

| | | | | |
|---|---|---|---|---|
| | | | Nick | % |
| mdRNA | 5′ Sense* (SEQ ID NO.) | 3′ Sense* (SEQ ID NO.) | Pos | KD |

| | | | | |
|---|---|---|---|---|
| G1498-wt | GGAUCUUAUUUCUUCGGAGdTdT (7) | — | — | 85.8 |
| G1498-L | GGAUCUUAUUUCUUCG GAGdTdT (61) | — | — | 86.8 |
| G1498: Nkd8-1 | GGAUCUUA (12) | UUUCUUCGGAGdTdT (47) | 8 | 36.0 |
| G1498: Nkd8-2 | GGAUCUUA (40) | UUUCUUCGGAGdTdT (54) | 8 | 66.2 |
| G1498: Nkd9-1 | GGAUCUUAU (20) | UUCUUCGGAGdTdT (48) | 9 | 60.9 |
| G1498: Nkd9-2 | GGAUCUUAU (41) | UUCUUCGGAGdTdT (55) | 9 | 64.4 |
| G1498: Nkd10-1 | GGAUCUUAUU (21) | UCUUCGGAGdTdT (49) | 10 | 58.2 |
| G1498: Nkd10-2 | GGAUCUUAUU (42) | UCUUCGGAGdTdT (56) | 10 | 68.5 |
| G1498: Nkd11-1 | GGAUCUUAUUU (22) | CUUCGGAGdTdT (50) | 11 | 75.9 |
| G1498: Nkd11-2 | GGAUCUUAUUU (43) | CUUCGGAGdTdT (57) | 11 | 67.1 |
| G1498: Nkd12-1 | GGAUCUUAUUUC (23) | UUCGGAGdTdT (51) | 12 | 59.9 |
| G1498: Nkd12-2 | GGAUCUUAUUUC (44) | UUCGGAGdTdT (58) | 12 | 72.8 |
| G1498: Nkd13-1 | GGAUCUUAUUUCU (38) | UCGGAGdTdT (52) | 13 | 37.1 |
| G1498: Nkd13-2 | GGAUCUUAUUUCU (45) | UCGGAGdTdT (59) | 13 | 74.3 |
| G1498: Nkd14-1 | GGAUCUUAUUUCUU (39) | CGGAGdTdT (53) | 14 | 29.0 |
| G1498: Nkd14-2 | GGAUCUUAUUUCUU (46) | CGGAGdTdT (60) | 14 | 60.2 |
| Qneg | — | — | — | 0 |
| Plasmid | — | — | — | 3.6 |

*Nucleotides that are bold and underlined are locked nucleic acids.

[0212] The dual fluorescence assay of Example 3 was used to measure knockdown activity. These data show that increasing the number of locked nucleic acid substitutions tends to increase activity of an mdRNA having a nick at any of a number of positions. The single locked nucleic acid per sense strand appears to be most active when the nick is at position 11 (see FIG. 9). But, multiple locked nucleic acids on each sense strand make mdRNA having a nick at any position as active as the most optimal nick position with a single substitution (i.e., position 11) (FIG. 9). Thus, mdRNA having duplex stabilizing modifications make mdRNA essentially equally active regardless of the nick position.

[0213] Similar results were observed when locked nucleic acid substitutions were made in the LacZ dicer substrate mdRNA of Example 2 (SEQ ID NOS:3 and 4). The lacZ dicer was nicked at positions 8 to 14, and a duplicate set of nicked LacZ dicer molecules were made with the exception that the A at position 3 (from the 5′-end) of the 5′ sense strand was substituted for a locked nucleic acid A (LNA-A). As is evident from FIG. 10, most of the nicked lacZ dicer molecules containing LNA-A were as potent in knockdown activity as the unsubstituted lacZ dicer.

### Example 7

### mdRNA Knockdown of Influenza Virus Titer

[0214] The activity of a dicer substrate nicked dsRNA in reducing influenza virus titer as compared to a wild-type dsRNA (i.e., not having a nick) was examined. The influenza dicer substrate sequence (25/27) is as follows:

| | |
|---|---|
| Sense | |
| 5′-GGAUCUUAUUUCUUCGGAGACAAdTdG | (SEQ ID NO: 62) |
| Antisense | |
| 5′-CAUUGUCUCCGAAGAAAUAAGAUCCUU | (SEQ ID NO: 11) |

The mdRNA sequences have a nicked sense strand after position 12, 13, and 14, respectively, as counted from the 5′-end, and the G at position 2 is substituted with locked nucleic acid G.

[0215] For the viral infectivity assay, Vero cells were seeded at 6.5×10⁴ cells/well the day before transfection in 500 μl 10% FBS/DMEM media per well. Samples of 100, 10, 1, 0.1, and 0.01 nM stock of each dsRNA were complexed with 1.0 μl (1 mg/ml stock) of Lipofectamine™ 2000 (Invitrogen, Carlsbad, Calif.) and incubated for 20 minutes at room temperature in 150 μl OPTIMEM (total volume) (Gibco, Carlsbad, Calif.). Vero cells were washed with OPTIMEM, and 150 μl of the transfection complex in OPTIMEM was then added to each well containing 150 μl of OPTIMEM media. Triplicate wells were tested for each condition. An additional control well with no transfection condition was prepared. Three hours post transfection, the media was removed. Each well was washed once with 200 μl PBS containing 0.3% BSA and 10 mM HEPES/PS. Cells in each well were infected with WSN strain of influenza virus at an MOI 0.01 in 200 μl of infection media containing 0.3% BSA/10 mM HEPES/PS and 4 μg/ml trypsin. The plate was incubated for 1 hour at 37° C. Unadsorbed virus was washed off with the 200 μl of infection media and discarded, then 400 μl DMEM containing 0.3% BSA/10 mM HEPES/PS and 4 μg/ml trypsin was added to each well. The plate was incubated at 37° C., 5% CO₂ for 48 hours, then 50 μl supernatant from each well was tested in duplicate by TCID₅₀ assays (50% Tissue-Culture Infective Dose, WHO protocol) in MDCK cells and titers were estimated using the Spearman and Karber formula. The results show that these mdRNAs show about a 50% to 60% viral titer knockdown, even at a concentration as low as 10 pM (FIG. 11).

[0216] An in vivo influenza mouse model was also used to examine the activity of a dicer substrate nicked dsRNA in reducing influenza virus titer as compared to a wild-type dsRNA (i.e., not having a nick). Female BALB/c mice (age 8-10 weeks with 5-10 mice per group) were dosed intranasally with 120 nmol/kg/day dsRNA (formulated in C12-norArg(NH₃+Cl⁻)-C12/DSPE-PEG2000/DSPC/cholesterol at a ratio of 30:1:20:49) for three consecutive days before intranasal challenge with influenza strain PR8 (20 PFU/mouse). Two days after infection, whole lungs are harvested from each mouse and placed in a solution of PBS/0.3% BSA with antibiotics, homogenize, and measure the viral titer (TCID₅₀). Doses were well tolerated by the mice, indicated by less than 2% body weight reduction in any of the dose groups. The mdRNAs tested exhibit similar, if not slightly greater, virus reduction in vivo as compared to unmodified and unnicked G1498 dicer substrate (see FIG. 12). Hence, mdRNA are active in vivo.

### Example 8

### Effect of mdRNA on Cytokine Induction

[0217] The effect of the mdRNA structure on cytokine induction in vivo was examined. Female BALB/c mice (age 7-9 weeks) were dosed intranasally with about 50 μM dsRNA (formulated in C12-norArg(NH₃+Cl-)-C12/DSPE-PEG2000/DSPC/cholesterol at a ratio of 30:1:20:49) or with 605 nmol/kg/day naked dsRNA for three consecutive days. About four hours after the final dose is administered, the mice were sacrificed to collect bronchoalveolar fluid (BALF), and collected blood is processed to serum for evaluation of the cytokine response. Bronchial lavage was performed with 0.5 mL ice-cold 0.3% BSA in saline two times for a total of 1 mL. BALF was spun and supernatants collected and frozen until cytokine analysis. Blood was collected from the vena cava immediately following euthanasia, placed into serum separator tubes, and allowed to clot at room temperature for at least 20 minutes. The samples were processed to serum, aliquoted into Millipore ULTRAFREE 0.22 μm filter tubes, spun at 12,000 rpm, frozen on dry ice, and then stored at −70° C. until analysis. Cytokine analysis of BALF and plasma were performed using the Procarta™ mouse 10-Plex Cytokine Assay Kit (Panomics, Fremont, Calif.) on a Bio-Plex™ array reader. Toxicity parameters were also measured, including body weights, prior to the first dose on day 0 and again on day 3 (just prior to euthanasia). Spleens were harvested and weighed (normalized to final body weight). The results are provided in Table 5.

TABLE 5
In vivo Cytokine Induction by Naked mdRNA

| | | | G1498:Nkd | | G1498:DSNkd | G1498:DSNkd | G1498:DSNkd |
|---|---|---|---|---|---|---|---|
| Cytokine | | G1498 | 11-1 | G1498:DS | 12-1 | 13-1 | 14-1 |
| IL-6 | Conc | 90.68 | 10.07 | 77.35 | 17.17 | 18.21 | 38.59 |
| | (pg/mL) | | | | | | |
| | Fold decrease | — | 9 | — | 5 | 4 | 2 |
| IL-12 | Conc | 661.48 | 20.32 | 1403.61 | 25.07 | 37.70 | 57.02 |
| (p40) | (pg/mL) | | | | | | |
| | Fold decrease | — | 33 | — | 56 | 37 | 25 |
| TNFα | Conc | 264.49 | 25.59 | 112.95 | 20.52 | 29.00 | 64.93 |
| | (pg/mL) | | | | | | |
| | Fold decrease | — | 10 | — | 6 | 4 | 2 |

[0218] The mdRNA (RISC or dicer sized) induced cytokines to lesser extent than the intact (i.e., not nicked) parent molecules. The decrease in cytokine induction was greatest when looking at IL-12 (p40), the cytokine with consistently the highest levels of induction of the 10 cytokine multiplex assay. For the mdRNA, the decrease in IL-12 (p40) ranges from 25- to 56-fold, while the reduction in either IL-6 or TNFα induction was more modest (the decrease in these two cytokines ranges from 2- to 10-fold). Thus, the mdRNA structure appears to provide an advantage in vivo in that cytokine induction is minimized compared to unmodified dsRNA.

[0219] Similar results were obtained with the formulated mdRNA, although the reduction in induction was not as prominent. In addition, the presence or absence of a locked nucleic acid has no effect on cytokine induction. These results are shown in Table 6.

TABLE 6
In vivo Cytokine Induction by Formulated mdRNA

| | | | G1498:Nkd | G1498:Nkd | G1498:DSNkd | G1498:DSNkd |
|---|---|---|---|---|---|---|
| Cytokine | | G1498:DS | 12-1 | 13-1 | 14-1 | 13 |
| IL-6 | Conc (pg/mL) | 29.04 | 52.95 | 10.28 | 7.79 | 44.29 |
| | Fold decrease | — | −1.8 | 3 | 4 | −1.5 |
| IL-12 (p40) | Conc (pg/mL) | 298.93 | 604.24 | 136.45 | 126.71 | 551.49 |
| | Fold decrease | — | 0 | 2 | 2 | 1 |
| TNFα | Conc (pg/mL) | 13.49 | 21.35 | 3.15 | 3.15 | 18.69 |
| | Fold decrease | — | −1.6 | 4 | 4 | 1.4 |

[0220] The teachings of all of references cited herein including patents, patent applications, journal articles, wedpages, tables, and priority documents are incorporated herein in their entirety by reference. Although the foregoing disclosure has been described in detail by way of example for purposes of clarity of understanding, it will be apparent to the artisan that certain changes and modifications may be practiced within the scope of the appended claims which are presented by way of illustration not limitation. In this context, various publications and other references have been cited within the foregoing disclosure for economy of description. It is noted, however, that the various publications discussed herein are incorporated solely for their disclosure prior to the filing date of the present application, and the inventors reserve the right to antedate such disclosure by virtue of prior invention.

1-39. (canceled)

40. A meroduplex ribonucleic acid (mdRNA) molecule that down regulates the expression of any one of a human v-Ha-ras Harvey rat sarcoma viral oncogene homolog (HRAS) mRNA, human v-Ki-ras2 Kirsten rat sarcoma viral oncogene homolog (KRAS) mRNA, or human neuroblastoma RAS viral (v-ras) oncogene homolog (NRAS) mRNA, comprising a first strand of 15 to 40 nucleotides in length that is complementary to a portion of any one of a human HRAS mRNA as set forth in SEQ ID NO:1158 or 1159, human KRAS mRNA as set forth in SEQ ID NO:1309 or 1310, or human NRAS mRNA as set forth in SEQ ID NO:2281, and a second strand and a third strand that is each complementary to non-overlapping regions of the first strand, wherein the second strand and third strand can anneal with the first strand to form at least two double-stranded regions spaced apart by a nick or a gap.

41. The mdRNA molecule of claim 40 wherein the first strand is 15 to 25 nucleotides in length or 26 to 40 nucleotides in length.

42. The mdRNA molecule of claim 40 wherein the gap comprises from 1 to 10 unpaired nucleotides.

43. The mdRNA molecule of claim 40 wherein the double-stranded regions have a combined length of about 15 base pairs to about 40 base pairs.

44. The mdRNA molecule of claim 40 wherein the mdRNA molecule comprises at least one 5-methyluridine, 2-thioribothymidine, or 2′-O-methyl-5-methyluridine.

45. The mdRNA molecule of claim 40 wherein the mdRNA molecule comprises at least one locked nucleic acid (LNA) molecule, deoxy nucleotide, G clamp, 2′-sugar modification, modified internucleoside linkage, or any combination thereof.

46. The mdRNA molecule of claim 40 wherein the mdRNA contains an overhang of one to four nucleotides on at least one 3′-end that is not part of the gap or has a blunt end at one or both ends of the mdRNA.

47. The mdRNA molecule of claim 40 wherein at least one pyrimidine of the mdRNA molecule is a pyrimidine nucleoside according to Formula I or II: [chemical structure]
wherein:
R¹ and R² are each independently a —H, —OH, —OCH₃, —OCH₂OCH₂CH₃, —OCH₂CH₂OCH₃, halogen, substituted or unsubstituted C₁-C₁₀ alkyl, alkoxy, alkoxyalkyl, hydroxyalkyl, carboxyalkyl, alkylsulfonylamino, aminoalkyl, dialkylamino, alkylaminoalkyl, dialkylaminoalkyl, haloalkyl, trifluoromethyl, cycloalkyl, (cycloalkyl)alkyl, substituted or unsubstituted C₂-C₁₀ alkenyl, substituted or unsubstituted —O-allyl, —O—CH₂CH═CH₂, —O—CH═CHCH₃, substituted or unsubstituted C₂-C₁₀ alkynyl, carbamoyl, carbamyl, carboxy, carbonylamino, substituted or unsubstituted aryl, substituted or unsubstituted aralkyl, —NH₂, —NO₂, —C≡, or heterocyclo group,
R³ and R⁴ are each independently a hydroxyl, a protected hydroxyl, a phosphate, or an internucleoside linking group, and
R⁵ and R⁸ are each independently O or S.

48. The mdRNA molecule of claim 47 wherein at least one nucleoside is according to Formula I and in which R¹ is methyl and R² is —OH or —O-methyl.

49. The mdRNA molecule of claim 47 wherein at least one R² is selected from the group consisting of 2′-O—(C₁-C₅) alkyl, 2′-O-methyl, 2′-OCH₂OCH₂CH₃, 2′-OCH₂CH₂OCH₃, 2′-O-allyl, and fluoro.

50. The mdRNA molecule of claim 40 wherein the first strand is 19 to 23 nucleotides in length and is complementary to a human HRAS nucleic acid sequence as set forth in any one of SEQ ID NOS:1160-1308, or human KRAS nucleic acid sequence as set forth in any one of SEQ ID NOS:1311-2280, or human NRAS nucleic acid sequence as set forth in any one of SEQ ID NOS:2282-2470.

51. The mdRNA molecule of claim 40 wherein the first strand is 25 to 29 nucleotides in length and is complementary to a human HRAS nucleic acid sequence as set forth in any one of SEQ ID NOS:1160-1308, or human KRAS nucleic acid sequence as set forth in any one of SEQ ID NOS:1311-2280, or human NRAS nucleic acid sequence as set forth in any one of SEQ ID NOS:2282-2470.

52. A method for reducing the expression of a human HRAS, KRAS, or NRAS gene, comprising administering an mdRNA molecule of claim 40 to a cell expressing a human HRAS, KRAS, or NRAS gene, wherein the mdRNA molecule reduces the expression of the human HRAS, KRAS, or NRAS gene in the cell.

53. The method according to claim 52 wherein the cell is a human cell.

54. A double-stranded ribonucleic acid (dsRNA) molecule that down regulates the expression of any one of a human v-Ha-ras Harvey rat sarcoma viral oncogene homolog (HRAS) mRNA, human v-Ki-ras2 Kirsten rat sarcoma viral oncogene homolog (KRAS) mRNA, or human neuroblastoma RAS viral (v-ras) oncogene homolog (NRAS) mRNA, the dsRNA molecule comprising a first strand of 15 to 40 nucleotides in length that is complementary to a portion of any one of a human HRAS mRNA as set forth in SEQ ID NO:1158 or 1159, human KRAS mRNA as set forth in SEQ ID NO:1309 or 1310, or human NRAS mRNA as set forth in SEQ ID NO:2281, and a second strand that is complementary to the first strand.

55. The dsRNA molecule of claim 54 wherein the first strand is from 15 to 25 nucleotides in length or 26 to 40 nucleotides in length.

56. The dsRNA molecule of claim 54 wherein the dsRNA molecule has a blunt end at one or both ends of the dsRNA.

57. The dsRNA molecule of claim 54 wherein the dsRNA molecule has a 3′-end overhang of one to four nucleotides at one or both ends of the dsRNA.

58. The dsRNA molecule of claim 54 wherein the dsRNA molecule comprises at least one 5-methyluridine, 2-thioribothymidine, or 2′-O-methyl-5-methyluridine.

59. The dsRNA molecule of claim 54 wherein the dsRNA molecule comprises at least one locked nucleic acid (LNA) molecule, deoxy nucleotide, G clamp, 2′-sugar modification, modified internucleoside linkage, or any combination thereof.

60. The dsRNA molecule of claim 54 wherein the dsRNA molecule has a 5′-terminal end comprising a hydroxyl or a phosphate.

61. The dsRNA molecule of claim 54 wherein at least one pyrimidine of the dsRNA molecule comprises a pyrimidine nucleoside according to Formula I or II: [chemical structure]
wherein:
R¹ and R² are each independently a —H, —OH, —OCH₃, —OCH₂OCH₂CH₃, —OCH₂CH₂OCH₃, halogen, substituted or unsubstituted C₁-C₁₀ alkyl, alkoxy, alkoxyalkyl, hydroxyalkyl, carboxyalkyl, alkylsulfonylamino, aminoalkyl, dialkylamino, alkylaminoalkyl, dialkylaminoalkyl, haloalkyl, trifluoromethyl, cycloalkyl, (cycloalkyl)alkyl, substituted or unsubstituted C₂-C₁₀ alkenyl, substituted or unsubstituted —O-allyl, —O—CH₂CH═CH₂, —O—CH═CHCH₃, substituted or unsubstituted C₂-C₁₀ alkynyl, carbamoyl, carbamyl, carboxy, carbonylamino, substituted or unsubstituted aryl, substituted or unsubstituted aralkyl, —NH₂, —NO₂, —C≡N, or heterocyclo group,
R³ and R⁴ are each independently a hydroxyl, a protected hydroxyl, a phosphate, or an internucleoside linking group, and
R⁵ and R⁸ are each independently O or S.

62. The dsRNA molecule of claim 61 wherein at least one nucleoside is according to Formula I and in which R¹ is methyl and R² is —OH or —O-methyl.

63. The dsRNA molecule of claim 61 wherein at least one R² is selected from the group consisting of 2′-O—(C₁-C₅) alkyl, 2′-O-methyl, 2′-OCH₂OCH₂CH₃, 2′-OCH₂CH₂OCH₃, 2′-O-allyl, and 2′-fluoro.

64. A method for reducing the expression of a human HRAS, KRAS, or NRAS gene, comprising administering a dsRNA molecule of claim 54 to a cell expressing a human HRAS, KRAS, or NRAS gene, wherein the dsRNA molecule reduces the expression of the human HRAS, KRAS, or NRAS gene in the cell.

65. The method according to claim 64 wherein the cell is a human cell.

66. The dsRNA molecule of claim 54 wherein the first strand is 19 to 23 nucleotides in length and is complementary to a human HRAS nucleic acid sequence as set forth in any one of SEQ ID NOS:1160-1308, or human KRAS nucleic acid sequence as set forth in any one of SEQ ID NOS:1311-2280, or human NRAS nucleic acid sequence as set forth in any one of SEQ ID NOS:2282-2470.

67. The dsRNA molecule of claim 54 wherein the first strand is 25 to 29 nucleotides in length and is complementary to a human HRAS nucleic acid sequence as set forth in any one of SEQ ID NOS:1160-1308, or human KRAS nucleic acid sequence as set forth in any one of SEQ ID NOS:1311-2280, or human NRAS nucleic acid sequence as set forth in any one of SEQ ID NOS:2282-2470.

The application's sequence listing, which the Patent Office published only in electronic form, follows.

SEQUENCE LISTING (2445 sequences)

SEQ ID NO: 1 - DNA, 21 bp, Artificial Sequence
  Description of Combined DNA/RNA Molecule: Synthetic oligonucleotide
  Description of Artificial Sequence: Synthetic oligonucleotide
cuacacaaaucagcgauuutt

SEQ ID NO: 2 - DNA, 21 bp, Artificial Sequence
  Description of Combined DNA/RNA Molecule: Synthetic oligonucleotide
  Description of Artificial Sequence: Synthetic oligonucleotide
aaaucgcugauuuguguagtt

SEQ ID NO: 3 - DNA, 25 bp, Artificial Sequence
  Description of Combined DNA/RNA Molecule: Synthetic oligonucleotide
  Description of Artificial Sequence: Synthetic oligonucleotide
cuacacaaaucagcgauuuccaugt

SEQ ID NO: 4 - RNA, 27 nt, Artificial Sequence
  Description of Artificial Sequence: Synthetic oligonucleotide
acauggaaaucgcugauuuguguaguc

SEQ ID NO: 5 - RNA, 13 nt, Artificial Sequence
  Description of Artificial Sequence: Synthetic oligonucleotide
cuacacaaaucag

SEQ ID NO: 6 - DNA, 11 bp, Artificial Sequence
  Description of Combined DNA/RNA Molecule: Synthetic oligonucleotide
  Description of Artificial Sequence: Synthetic oligonucleotide
gauuuccaugt

SEQ ID NO: 7 - DNA, 21 bp, Artificial Sequence
  Description of Combined DNA/RNA Molecule: Synthetic oligonucleotide
  Description of Artificial Sequence: Synthetic oligonucleotide
ggaucuuauuucuucggagtt

SEQ ID NO: 8 - DNA, 21 bp, Artificial Sequence
  Description of Combined DNA/RNA Molecule: Synthetic oligonucleotide
  Description of Artificial Sequence: Synthetic oligonucleotide
cuccgaagaaauaagaucctt

SEQ ID NO: 9 - RNA, 11 nt, Artificial Sequence
  Description of Artificial Sequence: Synthetic oligonucleotide
ggaucuuauuu

SEQ ID NO: 10 - DNA, 10 bp, Artificial Sequence
  Description of Combined DNA/RNA Molecule: Synthetic oligonucleotide
  Description of Artificial Sequence: Synthetic oligonucleotide
cuucggagtt

SEQ ID NO: 11 - RNA, 27 nt, Artificial Sequence
  Description of Artificial Sequence: Synthetic oligonucleotide
cauugucuccgaagaaauaagauccuu

SEQ ID NO: 12 - RNA, 8 nt, Artificial Sequence
  Description of Artificial Sequence: Synthetic oligonucleotide
  modified_base (2): LNA-G
ggaucuua

SEQ ID NO: 13 - DNA, 17 bp, Artificial Sequence
  Description of Combined DNA/RNA Molecule: Synthetic oligonucleotide
  Description of Artificial Sequence: Synthetic oligonucleotide
uuucuucggagacaatg

SEQ ID NO: 14 - DNA, 16 bp, Artificial Sequence
  Description of Combined DNA/RNA Molecule: Synthetic oligonucleotide
  Description of Artificial Sequence: Synthetic oligonucleotide
uucuucggagacaatg

SEQ ID NO: 15 - DNA, 15 bp, Artificial Sequence
  Description of Combined DNA/RNA Molecule: Synthetic oligonucleotide
  Description of Artificial Sequence: Synthetic oligonucleotide
ucuucggagacaatg

SEQ ID NO: 16 - DNA, 14 bp, Artificial Sequence
  Description of Combined DNA/RNA Molecule: Synthetic oligonucleotide
  Description of Artificial Sequence: Synthetic oligonucleotide
cuucggagacaatg

SEQ ID NO: 17 - DNA, 13 bp, Artificial Sequence
  Description of Combined DNA/RNA Molecule: Synthetic oligonucleotide
  Description of Artificial Sequence: Synthetic oligonucleotide
uucggagacaatg

SEQ ID NO: 18 - DNA, 12 bp, Artificial Sequence
  Description of Combined DNA/RNA Molecule: Synthetic oligonucleotide
  Description of Artificial Sequence: Synthetic oligonucleotide
ucggagacaatg

SEQ ID NO: 19 - DNA, 11 bp, Artificial Sequence
  Description of Combined DNA/RNA Molecule: Synthetic oligonucleotide
  Description of Artificial Sequence: Synthetic oligonucleotide
cggagacaatg

SEQ ID NO: 20 - RNA, 9 nt, Artificial Sequence
  Description of Artificial Sequence: Synthetic oligonucleotide
  modified_base (2): LNA-G
ggaucuuau

SEQ ID NO: 21 - RNA, 10 nt, Artificial Sequence
  Description of Artificial Sequence: Synthetic oligonucleotide
  modified_base (2): LNA-G
ggaucuuauu

SEQ ID NO: 22 - RNA, 11 nt, Artificial Sequence
  Description of Artificial Sequence: Synthetic oligonucleotide
  modified_base (2): LNA-G
ggaucuuauuu

SEQ ID NO: 23 - RNA, 12 nt, Artificial Sequence
  Description of Artificial Sequence: Synthetic oligonucleotide
  modified_base (2): LNA-G
ggaucuuauuuc

SEQ ID NO: 24 - RNA, 8 nt, Artificial Sequence
  Description of Artificial Sequence: Synthetic oligonucleotide
  modified_base (3): LNA-A
cuacacaa

SEQ ID NO: 25 - DNA, 13 bp, Artificial Sequence
  Description of Artificial Sequence: Synthetic oligonucleotide
  modified_base (8): LNA-A
aucagcgauuutt

SEQ ID NO: 26 - DNA, 12 bp, Artificial Sequence
  Description of Artificial Sequence: Synthetic oligonucleotide
  modified_base (7): LNA-A
ucagcgauuutt

SEQ ID NO: 27 - DNA, 11 bp, Artificial Sequence
  Description of Artificial Sequence: Synthetic oligonucleotide
  modified_base (6): LNA-A
cagcgauuutt

SEQ ID NO: 28 - DNA, 10 bp, Artificial Sequence
  Description of Artificial Sequence: Synthetic oligonucleotide
  modified_base (5): LNA-A
agcgauuutt

SEQ ID NO: 29 - DNA, 9 bp, Artificial Sequence
  Description of Artificial Sequence: Synthetic oligonucleotide
  modified_base (4): LNA-A
gcgauuutt

SEQ ID NO: 30 - DNA, 8 bp, Artificial Sequence
  Description of Artificial Sequence: Synthetic oligonucleotide
  modified_base (3): LNA-A
cgauuutt

SEQ ID NO: 31 - DNA, 7 bp, Artificial Sequence
  Description of Artificial Sequence: Synthetic oligonucleotide
  modified_base (2): LNA-A
gauuutt

SEQ ID NO: 32 - RNA, 9 nt, Artificial Sequence
  Description of Artificial Sequence: Synthetic oligonucleotide
  modified_base (3): LNA-A
cuacacaaa

SEQ ID NO: 33 - RNA, 10 nt, Artificial Sequence
  Description of Artificial Sequence: Synthetic oligonucleotide
  modified_base (3): LNA-A
cuacacaaau

SEQ ID NO: 34 - RNA, 11 nt, Artificial Sequence
  Description of Artificial Sequence: Synthetic oligonucleotide
  modified_base (3): LNA-A
cuacacaaauc

SEQ ID NO: 35 - RNA, 12 nt, Artificial Sequence
  Description of Artificial Sequence: Synthetic oligonucleotide
  modified_base (3): LNA-A
cuacacaaauca

SEQ ID NO: 36 - RNA, 13 nt, Artificial Sequence
  Description of Artificial Sequence: Synthetic oligonucleotide
  modified_base (3): LNA-A
cuacacaaaucag

SEQ ID NO: 37 - RNA, 14 nt, Artificial Sequence
  Description of Artificial Sequence: Synthetic oligonucleotide
  modified_base (3): LNA-A
cuacacaaaucagc

SEQ ID NO: 38 - RNA, 13 nt, Artificial Sequence
  Description of Artificial Sequence: Synthetic oligonucleotide
  modified_base (2): LNA-G
ggaucuuauuucu

SEQ ID NO: 39 - RNA, 14 nt, Artificial Sequence
  Description of Artificial Sequence: Synthetic oligonucleotide
  modified_base (2): LNA-G
ggaucuuauuucuu

SEQ ID NO: 40 - RNA, 8 nt, Artificial Sequence
  Description of Artificial Sequence: Synthetic oligonucleotide
  modified_base (2): LNA-G
  modified_base (8): LNA-A
ggaucuua

SEQ ID NO: 41 - RNA, 9 nt, Artificial Sequence
  Description of Artificial Sequence: Synthetic oligonucleotide
  modified_base (2): LNA-G
  modified_base (9): LNA-U
ggaucuuau

SEQ ID NO: 42 - RNA, 10 nt, Artificial Sequence
  Description of Artificial Sequence: Synthetic oligonucleotide
  modified_base (2): LNA-G
  modified_base (10): LNA-U
ggaucuuauu

SEQ ID NO: 43 - RNA, 11 nt, Artificial Sequence
  Description of Artificial Sequence: Synthetic oligonucleotide
  modified_base (2): LNA-G
  modified_base (11): LNA-U
ggaucuuauuu

SEQ ID NO: 44 - RNA, 12 nt, Artificial Sequence
  Description of Artificial Sequence: Synthetic oligonucleotide
  modified_base (2): LNA-G
  modified_base (12): LNA-C
ggaucuuauuuc

SEQ ID NO: 45 - RNA, 13 nt, Artificial Sequence
  Description of Artificial Sequence: Synthetic oligonucleotide
  modified_base (2): LNA-G
  modified_base (13): LNA-U
ggaucuuauuucu

SEQ ID NO: 46 - RNA, 14 nt, Artificial Sequence
  Description of Artificial Sequence: Synthetic oligonucleotide
  modified_base (2): LNA-G
  modified_base (14): LNA-U
ggaucuuauuucuu

SEQ ID NO: 47 - DNA, 13 bp, Artificial Sequence
  Description of Combined DNA/RNA Molecule: Synthetic oligonucleotide
  Description of Artificial Sequence: Synthetic oligonucleotide
  modified_base (8): LNA-G
uuucuucggagtt

SEQ ID NO: 48 - DNA, 12 bp, Artificial Sequence
  Description of Combined DNA/RNA Molecule: Synthetic oligonucleotide
  Description of Artificial Sequence: Synthetic oligonucleotide
  modified_base (7): LNA-G
uucuucggagtt

SEQ ID NO: 49 - DNA, 11 bp, Artificial Sequence
  Description of Combined DNA/RNA Molecule: Synthetic oligonucleotide
  Description of Artificial Sequence: Synthetic oligonucleotide
  modified_base (6): LNA-G
ucuucggagtt

SEQ ID NO: 50 - DNA, 10 bp, Artificial Sequence
  Description of Combined DNA/RNA Molecule: Synthetic oligonucleotide
  Description of Artificial Sequence: Synthetic oligonucleotide
  modified_base (5): LNA-G
cuucggagtt

SEQ ID NO: 51 - DNA, 9 bp, Artificial Sequence
  Description of Combined DNA/RNA Molecule: Synthetic oligonucleotide
  Description of Artificial Sequence: Synthetic oligonucleotide
  modified_base (4): LNA-G
uucggagtt

SEQ ID NO: 52 - DNA, 8 bp, Artificial Sequence
  Description of Combined DNA/RNA Molecule: Synthetic oligonucleotide
  Description of Artificial Sequence: Synthetic oligonucleotide
  modified_base (3): LNA-G
ucggagtt

SEQ ID NO: 53 - DNA, 7 bp, Artificial Sequence
  Description of Combined DNA/RNA Molecule: Synthetic oligonucleotide
  Description of Artificial Sequence: Synthetic oligonucleotide
  modified_base (2): LNA-G
cggagtt

SEQ ID NO: 54 - DNA, 13 bp, Artificial Sequence
  Description of Combined DNA/RNA Molecule: Synthetic oligonucleotide
  Description of Artificial Sequence: Synthetic oligonucleotide
  modified_base (1): LNA-U
  modified_base (8): LNA-G
uuucuucggagtt

SEQ ID NO: 55 - DNA, 12 bp, Artificial Sequence
  Description of Combined DNA/RNA Molecule: Synthetic oligonucleotide
  Description of Artificial Sequence: Synthetic oligonucleotide
  modified_base (1): LNA-U
  modified_base (7): LNA-G
uucuucggagtt

SEQ ID NO: 56 - DNA, 11 bp, Artificial Sequence
  Description of Combined DNA/RNA Molecule: Synthetic oligonucleotide
  Description of Artificial Sequence: Synthetic oligonucleotide
  modified_base (1): LNA-U
  modified_base (6): LNA-G
ucuucggagtt

SEQ ID NO: 57 - DNA, 10 bp, Artificial Sequence
  Description of Combined DNA/RNA Molecule: Synthetic oligonucleotide
  Description of Artificial Sequence: Synthetic oligonucleotide
  modified_base (1): LNA-C
  modified_base (5): LNA-G
cuucggagtt

SEQ ID NO: 58 - DNA, 9 bp, Artificial Sequence
  Description of Combined DNA/RNA Molecule: Synthetic oligonucleotide
  Description of Artificial Sequence: Synthetic oligonucleotide
  modified_base (1): LNA-U
  modified_base (4): LNA-G
uucggagtt

SEQ ID NO: 59 - DNA, 8 bp, Artificial Sequence
  Description of Combined DNA/RNA Molecule: Synthetic oligonucleotide
  Description of Artificial Sequence: Synthetic oligonucleotide
  modified_base (1): LNA-U
  modified_base (3): LNA-G
ucggagtt

SEQ ID NO: 60 - DNA, 7 bp, Artificial Sequence
  Description of Combined DNA/RNA Molecule: Synthetic oligonucleotide
  Description of Artificial Sequence: Synthetic oligonucleotide
  modified_base (1): LNA-C
  modified_base (2): LNA-G
cggagtt

SEQ ID NO: 61 - DNA, 21 bp, Artificial Sequence
  Description of Combined DNA/RNA Molecule: Synthetic oligonucleotide
  Description of Artificial Sequence: Synthetic oligonucleotide
  modified_base (2): LNA-G
  modified_base (16): LNA-G
ggaucuuauuucuucggagtt

SEQ ID NO: 62 - DNA, 25 bp, Artificial Sequence
  Description of Combined DNA/RNA Molecule: Synthetic oligonucleotide
  Description of Artificial Sequence: Synthetic oligonucleotide
ggaucuuauuucuucggagacaatg

SEQ ID NO: 63 - RNA, 25 nt, Artificial Sequence
  Description of Artificial Sequence: Synthetic oligonucleotide
uaagcagaguucaaaagcccuucag

SEQ ID NO: 64 - RNA, 25 nt, Artificial Sequence
  Description of Artificial Sequence: Synthetic oligonucleotide
agcagaguucaaaagcccuucagcg

SEQ ID NO: 65 - RNA, 25 nt, Artificial Sequence
  Description of Artificial Sequence: Synthetic oligonucleotide
cucagggucugagugaagccgcucg

SEQ ID NO: 66 - RNA, 25 nt, Artificial Sequence
  Description of Artificial Sequence: Synthetic oligonucleotide
caagcaacuacaucacgccagucaa

SEQ ID NO: 67 - RNA, 25 nt, Artificial Sequence
  Description of Artificial Sequence: Synthetic oligonucleotide
aucaauggcagcuucuuggugcgug

SEQ ID NO: 68 - RNA, 25 nt, Artificial Sequence
  Description of Artificial Sequence: Synthetic oligonucleotide
uuccagcccacauuggauucaucag

SEQ ID NO: 69 - RNA, 25 nt, Artificial Sequence
  Description of Artificial Sequence: Synthetic oligonucleotide
cagcugagaauguggaauaccuaag

SEQ ID NO: 70 - RNA, 25 nt, Artificial Sequence
  Description of Artificial Sequence: Synthetic oligonucleotide
aacguaucuccuaauuugaggcuca

SEQ ID NO: 71 - RNA, 25 nt, Artificial Sequence
  Description of Artificial Sequence: Synthetic oligonucleotide
ccuaaaauaauuucucuacaauugg

SEQ ID NO: 72 - RNA, 25 nt, Artificial Sequence
  Description of Artificial Sequence: Synthetic oligonucleotide
uggaagauucagcuaguuaggagcc

SEQ ID NO: 73 - RNA, 25 nt, Artificial Sequence
  Description of Artificial Sequence: Synthetic oligonucleotide
uuaaacucuccuagucaauauccac

SEQ ID NO: 74 - RNA, 25 nt, Artificial Sequence
  Description of Artificial Sequence: Synthetic oligonucleotide
cagccuacaguuauguucagucaca

SEQ ID NO: 75 - RNA, 25 nt, Artificial Sequence
  Description of Artificial Sequence: Synthetic oligonucleotide
guuauguucagucacacacacauac

SEQ ID NO: 76 - RNA, 25 nt, Artificial Sequence
  Description of Artificial Sequence: Synthetic oligonucleotide
cacauacaaaauguuccuuuugcuu

SEQ ID NO: 77 - RNA, 25 nt, Artificial Sequence
  Description of Artificial Sequence: Synthetic oligonucleotide
uccuuuugcuuuuaaaguaauuuuu

SEQ ID NO: 78 - RNA, 25 nt, Artificial Sequence
  Description of Artificial Sequence: Synthetic oligonucleotide
ugaccugugaagcaacagucaaugg

SEQ ID NO: 79 - RNA, 25 nt, Artificial Sequence
  Description of Artificial Sequence: Synthetic oligonucleotide
cuaucucacacaucgacaaaccaau

SEQ ID NO: 80 - RNA, 25 nt, Artificial Sequence
  Description of Artificial Sequence: Synthetic oligonucleotide
uguccucaauuguacugcuaccacu

SEQ ID NO: 81 - RNA, 25 nt, Artificial Sequence
  Description of Artificial Sequence: Synthetic oligonucleotide
aaaccguagcuggcaagcggucuua

SEQ ID NO: 82 - RNA, 25 nt, Artificial Sequence
  Description of Artificial Sequence: Synthetic oligonucleotide
uagcuggcaagcggucuuaccggcu

SEQ ID NO: 83 - RNA, 25 nt, Artificial Sequence
  Description of Artificial Sequence: Synthetic oligonucleotide
uuguaugguuaaaagauggguuacc

SEQ ID NO: 84 - RNA, 25 nt, Artificial Sequence
  Description of Artificial Sequence: Synthetic oligonucleotide
ugguuaaaagauggguuaccugcga

SEQ ID NO: 85 - RNA, 25 nt, Artificial Sequence
  Description of Artificial Sequence: Synthetic oligonucleotide
cagggaauuauacaaucuugcugag

SEQ ID NO: 86 - RNA, 25 nt, Artificial Sequence
  Description of Artificial Sequence: Synthetic oligonucleotide
acaaucuugcugagcauaaaacagu

SEQ ID NO: 87 - RNA, 25 nt, Artificial Sequence
  Description of Artificial Sequence: Synthetic oligonucleotide
ccaauaaugaagaguccuuuauccu

SEQ ID NO: 88 - RNA, 25 nt, Artificial Sequence
  Description of Artificial Sequence: Synthetic oligonucleotide
acuuuggauguuccaacgcaaguug

SEQ ID NO: 89 - RNA, 25 nt, Artificial Sequence
  Description of Artificial Sequence: Synthetic oligonucleotide
aaugcuuccacuaaacugaaaccau

SEQ ID NO: 90 - RNA, 25 nt, Artificial Sequence
  Description of Artificial Sequence: Synthetic oligonucleotide
gagaaaguuugacuuuguuaaauau

SEQ ID NO: 91 - RNA, 25 nt, Artificial Sequence
  Description of Artificial Sequence: Synthetic oligonucleotide
aaagaacuacuguauauuaaaaguu

SEQ ID NO: 92 - RNA, 25 nt, Artificial Sequence
  Description of Artificial Sequence: Synthetic oligonucleotide
uuagaaauacggguuuugacuuaac

SEQ ID NO: 93 - RNA, 25 nt, Artificial Sequence
  Description of Artificial Sequence: Synthetic oligonucleotide
aacauggguacagcaaacucagcac

SEQ ID NO: 94 - RNA, 25 nt, Artificial Sequence
  Description of Artificial Sequence: Synthetic oligonucleotide
aaagacacagaagaugcugaccuca

SEQ ID NO: 95 - RNA, 25 nt, Artificial Sequence
  Description of Artificial Sequence: Synthetic oligonucleotide
uaguagggagguuuauucagaucgc

SEQ ID NO: 96 - RNA, 25 nt, Artificial Sequence
  Description of Artificial Sequence: Synthetic oligonucleotide
gccuucugcagcaggguucugggau

SEQ ID NO: 97 - RNA, 25 nt, Artificial Sequence
  Description of Artificial Sequence: Synthetic oligonucleotide
ggucugguacauauuggaaauuaug

SEQ ID NO: 98 - RNA, 25 nt, Artificial Sequence
  Description of Artificial Sequence: Synthetic oligonucleotide
cuaguccuuccgauggaagcacuag

SEQ ID NO: 99 - RNA, 25 nt, Artificial Sequence
  Description of Artificial Sequence: Synthetic oligonucleotide
ccagugaauauuguuuuuaugugga

SEQ ID NO: 100 - RNA, 25 nt, Artificial Sequence
  Description of Artificial Sequence: Synthetic oligonucleotide
augaauucaaguuggaauugguaga

SEQ ID NO: 101 - RNA, 25 nt, Artificial Sequence
  Description of Artificial Sequence: Synthetic oligonucleotide
caggacacagauuuagacuuggaga

SEQ ID NO: 102 - RNA, 25 nt, Artificial Sequence
  Description of Artificial Sequence: Synthetic oligonucleotide
cucaaagcacaguuacaguauucca

SEQ ID NO: 103 - RNA, 25 nt, Artificial Sequence
  Description of Artificial Sequence: Synthetic oligonucleotide
accacugccaccacugaugaauuaa

SEQ ID NO: 104 - RNA, 25 nt, Artificial Sequence
  Description of Artificial Sequence: Synthetic oligonucleotide
gaaacuacuagugccacaucaucac

SEQ ID NO: 105 - RNA, 25 nt, Artificial Sequence
  Description of Artificial Sequence: Synthetic oligonucleotide
aagucggacagccucaccaaacaga

SEQ ID NO: 106 - RNA, 25 nt, Artificial Sequence
  Description of Artificial Sequence: Synthetic oligonucleotide
gaaagcgaaaaauggaacaugaugg

SEQ ID NO: 107 - RNA, 25 nt, Artificial Sequence
  Description of Artificial Sequence: Synthetic oligonucleotide
cccucugauuuagcauguagacugc

SEQ ID NO: 108 - RNA, 25 nt, Artificial Sequence
  Description of Artificial Sequence: Synthetic oligonucleotide
ugagcuauuuaaggaucuauuuaug

SEQ ID NO: 109 - RNA, 25 nt, Artificial Sequence
  Description of Artificial Sequence: Synthetic oligonucleotide
aaaaggugaaaaagcacuauuauca

SEQ ID NO: 110 - RNA, 25 nt, Artificial Sequence
  Description of Artificial Sequence: Synthetic oligonucleotide
gaaaaagcacuauuaucaguucugc

SEQ ID NO: 111 - RNA, 25 nt, Artificial Sequence
  Description of Artificial Sequence: Synthetic oligonucleotide
ggcugaaaagaaagauuaaaccuac

SEQ ID NO: 112 - RNA, 25 nt, Artificial Sequence
  Description of Artificial Sequence: Synthetic oligonucleotide
uaaacccuuauaauaaaauccuucu

SEQ ID NO: 113 - RNA, 25 nt, Artificial Sequence
  Description of Artificial Sequence: Synthetic oligonucleotide
cauacuauuagccaaugcuguagac

SEQ ID NO: 114 - RNA, 25 nt, Artificial Sequence
  Description of Artificial Sequence: Synthetic oligonucleotide
gacagaagcauuuugauaggaauag

SEQ ID NO: 115 - RNA, 25 nt, Artificial Sequence
  Description of Artificial Sequence: Synthetic oligonucleotide
agagcaaauaagauaauggcccuga

SEQ ID NO: 116 - RNA, 25 nt, Artificial Sequence
  Description of Artificial Sequence: Synthetic oligonucleotide
ccaacauuuuucucuuccucaagca

SEQ ID NO: 117 - RNA, 25 nt, Artificial Sequence
  Description of Artificial Sequence: Synthetic oligonucleotide
uuaaguaugagaaaaguucagccca

SEQ ID NO: 118 - RNA, 25 nt, Artificial Sequence
  Description of Artificial Sequence: Synthetic oligonucleotide
caggaauaaagauggcugcugaacc

SEQ ID NO: 119 - RNA, 25 nt, Artificial Sequence
  Description of Artificial Sequence: Synthetic oligonucleotide
aauuugaaugaccaaguucucuuca

SEQ ID NO: 120 - RNA, 25 nt, Artificial Sequence
  Description of Artificial Sequence: Synthetic oligonucleotide
auguauaaagauagccagccuagag

SEQ ID NO: 121 - RNA, 25 nt, Artificial Sequence
  Description of Artificial Sequence: Synthetic oligonucleotide
ggcuguaacuaucucugugaagugu

SEQ ID NO: 122 - RNA, 25 nt, Artificial Sequence
  Description of Artificial Sequence: Synthetic oligonucleotide
ucugugaagugugagaaaauuucaa

SEQ ID NO: 123 - RNA, 25 nt, Artificial Sequence
  Description of Artificial Sequence: Synthetic oligonucleotide
ccuuuaaggaaaugaauccuccuga

SEQ ID NO: 124 - RNA, 25 nt, Artificial Sequence
  Description of Artificial Sequence: Synthetic oligonucleotide
aaggauacaaaaagugacaucauau

SEQ ID NO: 125 - RNA, 25 nt, Artificial Sequence
  Description of Artificial Sequence: Synthetic oligonucleotide
agaugcaauuugaaucuucaucaua

SEQ ID NO: 126 - RNA, 25 nt, Artificial Sequence
  Description of Artificial Sequence: Synthetic oligonucleotide
guucaaaacgaagacuagcuauuaa

SEQ ID NO: 127 - RNA, 25 nt, Artificial Sequence
  Description of Artificial Sequence: Synthetic oligonucleotide
gugaaaccucaucucuacuaaaaau

SEQ ID NO: 128 - RNA, 25 nt, Artificial Sequence
  Description of Artificial Sequence: Synthetic oligonucleotide
acgaaagagaagcucuaucucgccu

SEQ ID NO: 129 - RNA, 25 nt, Artificial Sequence
  Description of Artificial Sequence: Synthetic oligonucleotide
cuccacaagcgccuucgguccaguu

SEQ ID NO: 130 - RNA, 25 nt, Artificial Sequence
  Description of Artificial Sequence: Synthetic oligonucleotide
gagaagauuccaaagauguagccgc

SEQ ID NO: 131 - RNA, 25 nt, Artificial Sequence
  Description of Artificial Sequence: Synthetic oligonucleotide
aaucuggauucaaugaggagacuug

SEQ ID NO: 132 - RNA, 25 nt, Artificial Sequence
  Description of Artificial Sequence: Synthetic oligonucleotide
agaacagauuugagaguagugagga

SEQ ID NO: 133 - RNA, 25 nt, Artificial Sequence
  Description of Artificial Sequence: Synthetic oligonucleotide
ccagagcugugcagaugaguacaaa

SEQ ID NO: 134 - RNA, 25 nt, Artificial Sequence
  Description of Artificial Sequence: Synthetic oligonucleotide
ccucagauuguuguuguuaaugggc

SEQ ID NO: 135 - RNA, 25 nt, Artificial Sequence
  Description of Artificial Sequence: Synthetic oligonucleotide
cuauuuuaauuauuuuuaauuuauu

SEQ ID NO: 136 - RNA, 25 nt, Artificial Sequence
  Description of Artificial Sequence: Synthetic oligonucleotide
uuuaauuuauuaauauuuaaauaug

SEQ ID NO: 137 - RNA, 25 nt, Artificial Sequence
  Description of Artificial Sequence: Synthetic oligonucleotide
augcaguuugaauauccuuuguuuc

SEQ ID NO: 138 - RNA, 25 nt, Artificial Sequence
  Description of Artificial Sequence: Synthetic oligonucleotide
caugcugcuggcgucuaaguguuug

SEQ ID NO: 139 - RNA, 25 nt, Artificial Sequence
  Description of Artificial Sequence: Synthetic oligonucleotide
agaugugcauuucaccugugacaaa

SEQ ID NO: 140 - RNA, 25 nt, Artificial Sequence
  Description of Artificial Sequence: Synthetic oligonucleotide
ucaaaaccugugccaggcugaauua

SEQ ID NO: 141 - RNA, 25 nt, Artificial Sequence
  Description of Artificial Sequence: Synthetic oligonucleotide
gaauguggguagucauucuuacaau

SEQ ID NO: 142 - RNA, 25 nt, Artificial Sequence
  Description of Artificial Sequence: Synthetic oligonucleotide
auguggguagucauucuuacaauug

SEQ ID NO: 143 - RNA, 25 nt, Artificial Sequence
  Description of Artificial Sequence: Synthetic oligonucleotide
ugaaaaugagcaucagagaguguac

SEQ ID NO: 144 - RNA, 25 nt, Artificial Sequence
  Description of Artificial Sequence: Synthetic oligonucleotide
uugcuuuucauguagaacucagcag

SEQ ID NO: 145 - RNA, 25 nt, Artificial Sequence
  Description of Artificial Sequence: Synthetic oligonucleotide
uguauuucuauauuuauuuucagua

SEQ ID NO: 146 - RNA, 25 nt, Artificial Sequence
  Description of Artificial Sequence: Synthetic oligonucleotide
uuugauuaauguuucuuaaauggaa

SEQ ID NO: 147 - RNA, 25 nt, Artificial Sequence
  Description of Artificial Sequence: Synthetic oligonucleotide
caacguguauagugccuaaaauugu

SEQ ID NO: 148 - RNA, 25 nt, Artificial Sequence
  Description of Artificial Sequence: Synthetic oligonucleotide
cauauccuuggcuacuaacaucugg

SEQ ID NO: 149 - RNA, 25 nt, Artificial Sequence
  Description of Artificial Sequence: Synthetic oligonucleotide
uacuaacaucuggagacugugagcu

SEQ ID NO: 150 - RNA, 25 nt, Artificial Sequence
  Description of Artificial Sequence: Synthetic oligonucleotide
cauaaguugugugcuuuuuauuaau

SEQ ID NO: 151 - RNA, 25 nt, Artificial Sequence
  Description of Artificial Sequence: Synthetic oligonucleotide
gcaucauuuuggcucuucuuacauu

SEQ ID NO: 152 - RNA, 25 nt, Artificial Sequence
  Description of Artificial Sequence: Synthetic oligonucleotide
gcucuucuuacauuuguaaaaaugu

SEQ ID NO: 153 - RNA, 25 nt, Artificial Sequence
  Description of Artificial Sequence: Synthetic oligonucleotide
agauuaggucaucuuaauucauauu

SEQ ID NO: 154 - RNA, 25 nt, Artificial Sequence
  Description of Artificial Sequence: Synthetic oligonucleotide
auggaauugaaagaacuaaucauga

SEQ ID NO: 155 - RNA, 25 nt, Artificial Sequence
  Description of Artificial Sequence: Synthetic oligonucleotide
cacacucauuccuucugcucuuggg

SEQ ID NO: 156 - RNA, 25 nt, Artificial Sequence
  Description of Artificial Sequence: Synthetic oligonucleotide
uguagagguaaccaguagcuuugag

SEQ ID NO: 157 - RNA, 25 nt, Artificial Sequence
  Description of Artificial Sequence: Synthetic oligonucleotide
caaccacaugccacguaauauuuca

SEQ ID NO: 158 - RNA, 25 nt, Artificial Sequence
  Description of Artificial Sequence: Synthetic oligonucleotide
ucggaaacaaguuauucucuucacu

SEQ ID NO: 159 - RNA, 25 nt, Artificial Sequence
  Description of Artificial Sequence: Synthetic oligonucleotide
acucccaauaacuaaugcuaagaaa

SEQ ID NO: 160 - RNA, 25 nt, Artificial Sequence
  Description of Artificial Sequence: Synthetic oligonucleotide
aaugcuaagaaaugcugaaaaucaa

SEQ ID NO: 161 - RNA, 25 nt, Artificial Sequence
  Description of Artificial Sequence: Synthetic oligonucleotide
gucuuucucuaaauaugauuacuuu

SEQ ID NO: 162 - RNA, 25 nt, Artificial Sequence
  Description of Artificial Sequence: Synthetic oligonucleotide
ugaauuucaggcauuuuguucuaca

SEQ ID NO: 163 - RNA, 25 nt, Artificial Sequence
  Description of Artificial Sequence: Synthetic oligonucleotide
cgauucccucucacccgggacucuc

SEQ ID NO: 164 - RNA, 25 nt, Artificial Sequence
  Description of Artificial Sequence: Synthetic oligonucleotide
aggaaagugaaccuuuaaaguaaag

SEQ ID NO: 165 - RNA, 25 nt, Artificial Sequence
  Description of Artificial Sequence: Synthetic oligonucleotide
gaggcugcaugcucuggaagccugg

SEQ ID NO: 166 - RNA, 25 nt, Artificial Sequence
  Description of Artificial Sequence: Synthetic oligonucleotide
ucucugaacagaaaacaaaagagag

SEQ ID NO: 167 - RNA, 25 nt, Artificial Sequence
  Description of Artificial Sequence: Synthetic oligonucleotide
aacuuggcuguaaucaguuaugccg

SEQ ID NO: 168 - RNA, 25 nt, Artificial Sequence
  Description of Artificial Sequence: Synthetic oligonucleotide
agaagccaaaauuaaaagaagucca

SEQ ID NO: 169 - RNA, 25 nt, Artificial Sequence
  Description of Artificial Sequence: Synthetic oligonucleotide
auuaaaagaaguccaggugagguua

SEQ ID NO: 170 - RNA, 25 nt, Artificial Sequence
  Description of Artificial Sequence: Synthetic oligonucleotide
gaauccggauuaucgggaagaggac

SEQ ID NO: 171 - RNA, 25 nt, Artificial Sequence
  Description of Artificial Sequence: Synthetic oligonucleotide
aaugugacaucaaagcaaguauugu

SEQ ID NO: 172 - RNA, 25 nt, Artificial Sequence
  Description of Artificial Sequence: Synthetic oligonucleotide
caucaaagcaaguauuguagcacuc

SEQ ID NO: 173 - RNA, 25 nt, Artificial Sequence
  Description of Artificial Sequence: Synthetic oligonucleotide
agagagagaaaacaaaaccacaaau

SEQ ID NO: 174 - RNA, 25 nt, Artificial Sequence
  Description of Artificial Sequence: Synthetic oligonucleotide
ucgcuguaguauuuaagcccauaca

SEQ ID NO: 175 - RNA, 25 nt, Artificial Sequence
  Description of Artificial Sequence: Synthetic oligonucleotide
cgcuguaguauuuaagcccauacag

SEQ ID NO: 176 - RNA, 25 nt, Artificial Sequence
  Description of Artificial Sequence: Synthetic oligonucleotide
auuuaagcccauacagaaaccuucc

SEQ ID NO: 177 - RNA, 25 nt, Artificial Sequence
  Description of Artificial Sequence: Synthetic oligonucleotide
auuaaaauaaacaugguauaccuac

SEQ ID NO: 178 - RNA, 25 nt, Artificial Sequence
  Description of Artificial Sequence: Synthetic oligonucleotide
cuguucugaucggccaguuuucgga

SEQ ID NO: 179 - RNA, 25 nt, Artificial Sequence
  Description of Artificial Sequence: Synthetic oligonucleotide
aaauaauuugaacuuuggaacaggg

SEQ ID NO: 180 - RNA, 25 nt, Artificial Sequence
  Description of Artificial Sequence: Synthetic oligonucleotide
ugcgaccuuaauuuaacuuuccagu

SEQ ID NO: 181 - RNA, 25 nt, Artificial Sequence
  Description of Artificial Sequence: Synthetic oligonucleotide
cugagaaagcuaaaguuugguuuug

SEQ ID NO: 182 - RNA, 25 nt, Artificial Sequence
  Description of Artificial Sequence: Synthetic oligonucleotide
aguaaagaugcuacuucccacugua

SEQ ID NO: 183 - RNA, 25 nt, Artificial Sequence
  Description of Artificial Sequence: Synthetic oligonucleotide
cugcuuaauugcugauaccauauga

SEQ ID NO: 184 - RNA, 25 nt, Artificial Sequence
  Description of Artificial Sequence: Synthetic oligonucleotide
uaccauaugaaugaaacaugggcug

SEQ ID NO: 185 - RNA, 25 nt, Artificial Sequence
  Description of Artificial Sequence: Synthetic oligonucleotide
aacuuucuuauccaacuuuuucaua

SEQ ID NO: 186 - RNA, 25 nt, Artificial Sequence
  Description of Artificial Sequence: Synthetic oligonucleotide
ccuugcaugacaucaugaggccgga

SEQ ID NO: 187 - RNA, 25 nt, Artificial Sequence
  Description of Artificial Sequence: Synthetic oligonucleotide
ugaauuuguauaugacugcauuugu

SEQ ID NO: 188 - RNA, 25 nt, Artificial Sequence
  Description of Artificial Sequence: Synthetic oligonucleotide
gaauccuaguagaauguuuacuacc

SEQ ID NO: 189 - RNA, 25 nt, Artificial Sequence
  Description of Artificial Sequence: Synthetic oligonucleotide
gaaagggaagaauuuuuugaugaaa

SEQ ID NO: 190 - RNA, 25 nt, Artificial Sequence
  Description of Artificial Sequence: Synthetic oligonucleotide
uaucggcaugccagugugugaauuu

SEQ ID NO: 191 - RNA, 25 nt, Artificial Sequence
  Description of Artificial Sequence: Synthetic oligonucleotide
caccucauaguagagcaauguaugu

SEQ ID NO: 192 - RNA, 25 nt, Artificial Sequence
  Description of Artificial Sequence: Synthetic oligonucleotide
ccagaauugccaaagcacauauaua

SEQ ID NO: 193 - RNA, 25 nt, Artificial Sequence
  Description of Artificial Sequence: Synthetic oligonucleotide
uggugaucuggguaauaguuucucc

SEQ ID NO: 194 - RNA, 25 nt, Artificial Sequence
  Description of Artificial Sequence: Synthetic oligonucleotide
gaucuggguaauaguuucuccaaau

SEQ ID NO: 195 - RNA, 25 nt, Artificial Sequence
  Description of Artificial Sequence: Synthetic oligonucleotide
ggaugugaugaauacuuccuagaaa

SEQ ID NO: 196 - RNA, 25 nt, Artificial Sequence
  Description of Artificial Sequence: Synthetic oligonucleotide
cauuuccacagcuacaccauauaug

SEQ ID NO: 197 - RNA, 25 nt, Artificial Sequence
  Description of Artificial Sequence: Synthetic oligonucleotide
acagcuacaccauauaugaauggag

SEQ ID NO: 198 - RNA, 25 nt, Artificial Sequence
  Description of Artificial Sequence: Synthetic oligonucleotide
ugcaguucuuacacgagaagaagau

SEQ ID NO: 199 - RNA, 25 nt, Artificial Sequence
  Description of Artificial Sequence: Synthetic oligonucleotide
acgagaagaagaucauuuacaggga

SEQ ID NO: 200 - RNA, 25 nt, Artificial Sequence
  Description of Artificial Sequence: Synthetic oligonucleotide
cgagaagaagaucauuuacagggac

SEQ ID NO: 201 - RNA, 25 nt, Artificial Sequence
  Description of Artificial Sequence: Synthetic oligonucleotide
aagaagaucauuuacagggaccuga

SEQ ID NO: 202 - RNA, 25 nt, Artificial Sequence
  Description of Artificial Sequence: Synthetic oligonucleotide
agaggaagagguguuugacugcauc

SEQ ID NO: 203 - RNA, 25 nt, Artificial Sequence
  Description of Artificial Sequence: Synthetic oligonucleotide
gaggaagagguguuugacugcaucg

SEQ ID NO: 204 - RNA, 25 nt, Artificial Sequence
  Description of Artificial Sequence: Synthetic oligonucleotide
cuacuuugagggcgaguucacaggg

SEQ ID NO: 205 - RNA, 25 nt, Artificial Sequence
  Description of Artificial Sequence: Synthetic oligonucleotide
agggcaucuccuggcaccucugucc

SEQ ID NO: 206 - RNA, 25 nt, Artificial Sequence
  Description of Artificial Sequence: Synthetic oligonucleotide
ggagugauaugguuugucuuuuuaa

SEQ ID NO: 207 - RNA, 25 nt, Artificial Sequence
  Description of Artificial Sequence: Synthetic oligonucleotide
gagugauaugguuugucuuuuuaag

SEQ ID NO: 208 - RNA, 25 nt, Artificial Sequence
  Description of Artificial Sequence: Synthetic oligonucleotide
ugcaguaaagauccuaaagguuguc

SEQ ID NO: 209 - RNA, 25 nt, Artificial Sequence
  Description of Artificial Sequence: Synthetic oligonucleotide
aguaaagauccuaaagguugucgac

SEQ ID NO: 210 - RNA, 25 nt, Artificial Sequence
  Description of Artificial Sequence: Synthetic oligonucleotide
ugacaaaggacaaccuggcaauugu

SEQ ID NO: 211 - RNA, 25 nt, Artificial Sequence
  Description of Artificial Sequence: Synthetic oligonucleotide
gcaauugugacccaguggugcgagg

SEQ ID NO: 212 - RNA, 25 nt, Artificial Sequence
  Description of Artificial Sequence: Synthetic oligonucleotide
aacaucauccauagagacaugaaau

SEQ ID NO: 213 - RNA, 25 nt, Artificial Sequence
  Description of Artificial Sequence: Synthetic oligonucleotide
ugaaauccaacaauauauuucucca

SEQ ID NO: 214 - RNA, 25 nt, Artificial Sequence
  Description of Artificial Sequence: Synthetic oligonucleotide
aacaauauauuucuccaugaaggcu

SEQ ID NO: 215 - RNA, 25 nt, Artificial Sequence
  Description of Artificial Sequence: Synthetic oligonucleotide
aacaguaaagucacgcuggaguggu

SEQ ID NO: 216 - RNA, 25 nt, Artificial Sequence
  Description of Artificial Sequence: Synthetic oligonucleotide
ugugaagaaaguaaaggaagagagg

SEQ ID NO: 217 - RNA, 25 nt, Artificial Sequence
  Description of Artificial Sequence: Synthetic oligonucleotide
cuuccgagccauccuugcaucgggc

SEQ ID NO: 218 - RNA, 25 nt, Artificial Sequence
  Description of Artificial Sequence: Synthetic oligonucleotide
aauggagguugaauauccuacugug

SEQ ID NO: 219 - RNA, 25 nt, Artificial Sequence
  Description of Artificial Sequence: Synthetic oligonucleotide
ggagguugaauauccuacuguguaa

SEQ ID NO: 220 - RNA, 25 nt, Artificial Sequence
  Description of Artificial Sequence: Synthetic oligonucleotide
auuuugaguuuucccuuguagugua

SEQ ID NO: 221 - RNA, 25 nt, Artificial Sequence
  Description of Artificial Sequence: Synthetic oligonucleotide
uauccuguuuguucuuuguugauug

SEQ ID NO: 222 - RNA, 25 nt, Artificial Sequence
  Description of Artificial Sequence: Synthetic oligonucleotide
ccuguuuguucuuuguugauugaaa

SEQ ID NO: 223 - RNA, 25 nt, Artificial Sequence
  Description of Artificial Sequence: Synthetic oligonucleotide
cucuacagccuucuuuuucuuccau

SEQ ID NO: 224 - RNA, 25 nt, Artificial Sequence
  Description of Artificial Sequence: Synthetic oligonucleotide
ucuuccauagcuaaucuuccuucua

SEQ ID NO: 225 - RNA, 25 nt, Artificial Sequence
  Description of Artificial Sequence: Synthetic oligonucleotide
auaaucuuccuguugaaugcuucau

SEQ ID NO: 226 - RNA, 25 nt, Artificial Sequence
  Description of Artificial Sequence: Synthetic oligonucleotide
uaaucuuccuguugaaugcuucaug

SEQ ID NO: 227 - RNA, 25 nt, Artificial Sequence
  Description of Artificial Sequence: Synthetic oligonucleotide
cuucaugacuugaauucuacuuuga

SEQ ID NO: 228 - RNA, 25 nt, Artificial Sequence
  Description of Artificial Sequence: Synthetic oligonucleotide
aagagggagagaagcaacuacagac

SEQ ID NO: 229 - RNA, 25 nt, Artificial Sequence
  Description of Artificial Sequence: Synthetic oligonucleotide
cgucuccuaccagaccaaggucaac

SEQ ID NO: 230 - RNA, 25 nt, Artificial Sequence
  Description of Artificial Sequence: Synthetic oligonucleotide
gaucaaucggcccgacuaucucgac

SEQ ID NO: 231 - RNA, 25 nt, Artificial Sequence
  Description of Artificial Sequence: Synthetic oligonucleotide
ggacgaacauccaaccuucccaaac

SEQ ID NO: 232 - RNA, 25 nt, Artificial Sequence
  Description of Artificial Sequence: Synthetic oligonucleotide
agggucggaacccaagcuuagaacu

SEQ ID NO: 233 - RNA, 25 nt, Artificial Sequence
  Description of Artificial Sequence: Synthetic oligonucleotide
ucggaacccaagcuuagaacuuuaa

SEQ ID NO: 234 - RNA, 25 nt, Artificial Sequence
  Description of Artificial Sequence: Synthetic oligonucleotide
acccaagcuuagaacuuuaagcaac

SEQ ID NO: 235 - RNA, 25 nt, Artificial Sequence
  Description of Artificial Sequence: Synthetic oligonucleotide
gaacuuuaagcaacaagaccaccac

SEQ ID NO: 236 - RNA, 25 nt, Artificial Sequence
  Description of Artificial Sequence: Synthetic oligonucleotide
acuauucaguggcgagaaauaaagu

SEQ ID NO: 237 - RNA, 25 nt, Artificial Sequence
  Description of Artificial Sequence: Synthetic oligonucleotide
cuauucaguggcgagaaauaaaguu

SEQ ID NO: 238 - RNA, 25 nt, Artificial Sequence
  Description of Artificial Sequence: Synthetic oligonucleotide
aaacacagauaacaggaaaugaucc

SEQ ID NO: 239 - RNA, 25 nt, Artificial Sequence
  Description of Artificial Sequence: Synthetic oligonucleotide
cuuaagaaaagagaagaaaugaaac

SEQ ID NO: 240 - RNA, 25 nt, Artificial Sequence
  Description of Artificial Sequence: Synthetic oligonucleotide
cugaaggaguguguuuccauccucc

SEQ ID NO: 241 - RNA, 25 nt, Artificial Sequence
  Description of Artificial Sequence: Synthetic oligonucleotide
ucaccgcgggacugaaaaucuuuga

SEQ ID NO: 242 - RNA, 25 nt, Artificial Sequence
  Description of Artificial Sequence: Synthetic oligonucleotide
agcagaaauaagcgugccguucagg

SEQ ID NO: 243 - RNA, 25 nt, Artificial Sequence
  Description of Artificial Sequence: Synthetic oligonucleotide
aagcgugccguucaggguccagaag

SEQ ID NO: 244 - RNA, 25 nt, Artificial Sequence
  Description of Artificial Sequence: Synthetic oligonucleotide
agaaacagucacucaagacugcuug

SEQ ID NO: 245 - RNA, 25 nt, Artificial Sequence
  Description of Artificial Sequence: Synthetic oligonucleotide
agaggaagaagguccaugucuuugg

SEQ ID NO: 246 - RNA, 25 nt, Artificial Sequence
  Description of Artificial Sequence: Synthetic oligonucleotide
uguauucaaaauaugccugaaacac

SEQ ID NO: 247 - RNA, 25 nt, Artificial Sequence
  Description of Artificial Sequence: Synthetic oligonucleotide
auuuuccucccuuucucuguaccuc

SEQ ID NO: 248 - RNA, 25 nt, Artificial Sequence
  Description of Artificial Sequence: Synthetic oligonucleotide
caaagaaagauagagcaagacaaga

SEQ ID NO: 249 - RNA, 25 nt, Artificial Sequence
  Description of Artificial Sequence: Synthetic oligonucleotide
aagaaagauagagcaagacaagaaa

SEQ ID NO: 250 - RNA, 25 nt, Artificial Sequence
  Description of Artificial Sequence: Synthetic oligonucleotide
gaaagcauuuguuuguacaagaucc

SEQ ID NO: 251 - RNA, 25 nt, Artificial Sequence
  Description of Artificial Sequence: Synthetic oligonucleotide
ugaguuaaacgaacguacuugcaga

SEQ ID NO: 252 - RNA, 25 nt, Artificial Sequence
  Description of Artificial Sequence: Synthetic oligonucleotide
acugauacagaacgaucgauacaga

SEQ ID NO: 253 - RNA, 25 nt, Artificial Sequence
  Description of Artificial Sequence: Synthetic oligonucleotide
auauuauauauauauaaaaauaaau

SEQ ID NO: 254 - RNA, 25 nt, Artificial Sequence
  Description of Artificial Sequence: Synthetic oligonucleotide
auuauauauauauaaaaauaaauau

SEQ ID NO: 255 - RNA, 25 nt, Artificial Sequence
  Description of Artificial Sequence: Synthetic oligonucleotide
ucacuggauguauuugacugcugug

SEQ ID NO: 256 - RNA, 25 nt, Artificial Sequence
  Description of Artificial Sequence: Synthetic oligonucleotide
cagggaagaggaggagaugagagac

SEQ ID NO: 257 - RNA, 25 nt, Artificial Sequence
  Description of Artificial Sequence: Synthetic oligonucleotide
augaucuuuuuuuugucccacuugg

SEQ ID NO: 258 - RNA, 27 nt, Artificial Sequence
  Description of Artificial Sequence: Synthetic oligonucleotide
ggccgugaacuccucaucaaaauaccu

SEQ ID NO: 259 - RNA, 27 nt, Artificial Sequence
  Description of Artificial Sequence: Synthetic oligonucleotide
uggugugauggugaucaucugggccgu

SEQ ID NO: 260 - RNA, 27 nt, Artificial Sequence
  Description of Artificial Sequence: Synthetic oligonucleotide
aaacccgcaggauaguuuucuucccua

SEQ ID NO: 261 - RNA, 27 nt, Artificial Sequence
  Description of Artificial Sequence: Synthetic oligonucleotide
caaacuggaugaaauaaauuaaaaccc

SEQ ID NO: 262 - RNA, 27 nt, Artificial Sequence
  Description of Artificial Sequence: Synthetic oligonucleotide
agaaguccuuaacauuucccuacguga

SEQ ID NO: 263 - RNA, 27 nt, Artificial Sequence
  Description of Artificial Sequence: Synthetic oligonucleotide
cucugucccacuggguaaacccuggcc

SEQ ID NO: 264 - RNA, 27 nt, Artificial Sequence
  Description of Artificial Sequence: Synthetic oligonucleotide
cacaauaacaaauuuaaaccuugcucc

SEQ ID NO: 265 - RNA, 27 nt, Artificial Sequence
  Description of Artificial Sequence: Synthetic oligonucleotide
aaaugcauuugaacaacauaauacaca

SEQ ID NO: 266 - RNA, 27 nt, Artificial Sequence
  Description of Artificial Sequence: Synthetic oligonucleotide
ggcuuuccugucacaaagauuaaaaac

SEQ ID NO: 267 - RNA, 27 nt, Artificial Sequence
  Description of Artificial Sequence: Synthetic oligonucleotide
agggcuuuccugucacaaagauuaaaa

SEQ ID NO: 268 - RNA, 27 nt, Artificial Sequence
  Description of Artificial Sequence: Synthetic oligonucleotide
ggccaugcugggagacauaagcagcag

SEQ ID NO: 269 - RNA, 27 nt, Artificial Sequence
  Description of Artificial Sequence: Synthetic oligonucleotide
ucagggagaagcuucugaaacacuucu

SEQ ID NO: 270 - RNA, 27 nt, Artificial Sequence
  Description of Artificial Sequence: Synthetic oligonucleotide
aagggcuucuuccuuauugauggucag

SEQ ID NO: 271 - RNA, 27 nt, Artificial Sequence
  Description of Artificial Sequence: Synthetic oligonucleotide
ugaagggcuucuuccuuauugaugguc

SEQ ID NO: 272 - RNA, 27 nt, Artificial Sequence
  Description of Artificial Sequence: Synthetic oligonucleotide
cgcugaagggcuucuuccuuauugaug

SEQ ID NO: 273 - RNA, 27 nt, Artificial Sequence
  Description of Artificial Sequence: Synthetic oligonucleotide
gccgcugaagggcuucuuccuuauuga

SEQ ID NO: 274 - RNA, 27 nt, Artificial Sequence
  Description of Artificial Sequence: Synthetic oligonucleotide
acuggccgcugaagggcuucuuccuua

SEQ ID NO: 275 - RNA, 27 nt, Artificial Sequence
  Description of Artificial Sequence: Synthetic oligonucleotide
cggagcuuuucaccuuuaguuaugcuu

SEQ ID NO: 276 - RNA, 27 nt, Artificial Sequence
  Description of Artificial Sequence: Synthetic oligonucleotide
ccggagcuuuucaccuuuaguuaugcu

SEQ ID NO: 277 - RNA, 27 nt, Artificial Sequence
  Description of Artificial Sequence: Synthetic oligonucleotide
cagacuguugacuggcgugauguaguu

SEQ ID NO: 278 - RNA, 27 nt, Artificial Sequence
  Description of Artificial Sequence: Synthetic oligonucleotide
cuuuugaacucugcuuaaauccagugg

SEQ ID NO: 279 - RNA, 27 nt, Artificial Sequence
  Description of Artificial Sequence: Synthetic oligonucleotide
gcuuuugaacucugcuuaaauccagug

SEQ ID NO: 280 - RNA, 27 nt, Artificial Sequence
  Description of Artificial Sequence: Synthetic oligonucleotide
agggcuuuugaacucugcuuaaaucca

SEQ ID NO: 281 - RNA, 27 nt, Artificial Sequence
  Description of Artificial Sequence: Synthetic oligonucleotide
aagggcuuuugaacucugcuuaaaucc

SEQ ID NO: 282 - RNA, 27 nt, Artificial Sequence
  Description of Artificial Sequence: Synthetic oligonucleotide
ugaagggcuuuugaacucugcuuaaau

SEQ ID NO: 283 - RNA, 27 nt, Artificial Sequence
  Description of Artificial Sequence: Synthetic oligonucleotide
cugaagggcuuuugaacucugcuuaaa

SEQ ID NO: 284 - RNA, 27 nt, Artificial Sequence
  Description of Artificial Sequence: Synthetic oligonucleotide
cgcugaagggcuuuugaacucugcuua

SEQ ID NO: 285 - RNA, 27 nt, Artificial Sequence
  Description of Artificial Sequence: Synthetic oligonucleotide
cgagcggcuucacucagacccugaggc

SEQ ID NO: 286 - RNA, 27 nt, Artificial Sequence
  Description of Artificial Sequence: Synthetic oligonucleotide
uugacuggcgugauguaguugcuuggg

SEQ ID NO: 287 - RNA, 27 nt, Artificial Sequence
  Description of Artificial Sequence: Synthetic oligonucleotide
cacgcaccaagaagcugccauugaucc

SEQ ID NO: 288 - RNA, 27 nt, Artificial Sequence
  Description of Artificial Sequence: Synthetic oligonucleotide
cugaugaauccaaugugggcuggaauc

SEQ ID NO: 289 - RNA, 27 nt, Artificial Sequence
  Description of Artificial Sequence: Synthetic oligonucleotide
cuuagguauuccacauucucagcugug

SEQ ID NO: 290 - RNA, 27 nt, Artificial Sequence
  Description of Artificial Sequence: Synthetic oligonucleotide
ugagccucaaauuaggagauacguuuu

SEQ ID NO: 291 - RNA, 27 nt, Artificial Sequence
  Description of Artificial Sequence: Synthetic oligonucleotide
ccaauuguagagaaauuauuuuaggaa

SEQ ID NO: 292 - RNA, 27 nt, Artificial Sequence
  Description of Artificial Sequence: Synthetic oligonucleotide
ggcuccuaacuagcugaaucuuccaau

SEQ ID NO: 293 - RNA, 27 nt, Artificial Sequence
  Description of Artificial Sequence: Synthetic oligonucleotide
guggauauugacuaggagaguuuaaaa

SEQ ID NO: 294 - RNA, 27 nt, Artificial Sequence
  Description of Artificial Sequence: Synthetic oligonucleotide
ugugacugaacauaacuguaggcugaa

SEQ ID NO: 295 - RNA, 27 nt, Artificial Sequence
  Description of Artificial Sequence: Synthetic oligonucleotide
guaugugugugugacugaacauaacug

SEQ ID NO: 296 - RNA, 27 nt, Artificial Sequence
  Description of Artificial Sequence: Synthetic oligonucleotide
aagcaaaaggaacauuuuguaugugug

SEQ ID NO: 297 - RNA, 27 nt, Artificial Sequence
  Description of Artificial Sequence: Synthetic oligonucleotide
aaaaauuacuuuaaaagcaaaaggaac

SEQ ID NO: 298 - RNA, 27 nt, Artificial Sequence
  Description of Artificial Sequence: Synthetic oligonucleotide
ccauugacuguugcuucacaggucaga

SEQ ID NO: 299 - RNA, 27 nt, Artificial Sequence
  Description of Artificial Sequence: Synthetic oligonucleotide
auugguuugucgaugugugagauaguu

SEQ ID NO: 300 - RNA, 27 nt, Artificial Sequence
  Description of Artificial Sequence: Synthetic oligonucleotide
agugguagcaguacaauugaggacaag

SEQ ID NO: 301 - RNA, 27 nt, Artificial Sequence
  Description of Artificial Sequence: Synthetic oligonucleotide
uaagaccgcuugccagcuacgguuuca

SEQ ID NO: 302 - RNA, 27 nt, Artificial Sequence
  Description of Artificial Sequence: Synthetic oligonucleotide
agccgguaagaccgcuugccagcuacg

SEQ ID NO: 303 - RNA, 27 nt, Artificial Sequence
  Description of Artificial Sequence: Synthetic oligonucleotide
gguaacccaucuuuuaaccauacaacu

SEQ ID NO: 304 - RNA, 27 nt, Artificial Sequence
  Description of Artificial Sequence: Synthetic oligonucleotide
ucgcagguaacccaucuuuuaaccaua

SEQ ID NO: 305 - RNA, 27 nt, Artificial Sequence
  Description of Artificial Sequence: Synthetic oligonucleotide
cucagcaagauuguauaauucccugca

SEQ ID NO: 306 - RNA, 27 nt, Artificial Sequence
  Description of Artificial Sequence: Synthetic oligonucleotide
acuguuuuaugcucagcaagauuguau

SEQ ID NO: 307 - RNA, 27 nt, Artificial Sequence
  Description of Artificial Sequence: Synthetic oligonucleotide
aggauaaaggacucuucauuauuggaa

SEQ ID NO: 308 - RNA, 27 nt, Artificial Sequence
  Description of Artificial Sequence: Synthetic oligonucleotide
caacuugcguuggaacauccaaagugu

SEQ ID NO: 309 - RNA, 27 nt, Artificial Sequence
  Description of Artificial Sequence: Synthetic oligonucleotide
augguuucaguuuaguggaagcauuua

SEQ ID NO: 310 - RNA, 27 nt, Artificial Sequence
  Description of Artificial Sequence: Synthetic oligonucleotide
auauuuaacaaagucaaacuuucucac

SEQ ID NO: 311 - RNA, 27 nt, Artificial Sequence
  Description of Artificial Sequence: Synthetic oligonucleotide
aacuuuuaauauacaguaguucuuuuc

SEQ ID NO: 312 - RNA, 27 nt, Artificial Sequence
  Description of Artificial Sequence: Synthetic oligonucleotide
guuaagucaaaacccguauuucuaaag

SEQ ID NO: 313 - RNA, 27 nt, Artificial Sequence
  Description of Artificial Sequence: Synthetic oligonucleotide
gugcugaguuugcuguacccauguuga

SEQ ID NO: 314 - RNA, 27 nt, Artificial Sequence
  Description of Artificial Sequence: Synthetic oligonucleotide
ugaggucagcaucuucugugucuuuac

SEQ ID NO: 315 - RNA, 27 nt, Artificial Sequence
  Description of Artificial Sequence: Synthetic oligonucleotide
gcgaucugaauaaaccucccuacuagc

SEQ ID NO: 316 - RNA, 27 nt, Artificial Sequence
  Description of Artificial Sequence: Synthetic oligonucleotide
aucccagaacccugcugcagaaggcca

SEQ ID NO: 317 - RNA, 27 nt, Artificial Sequence
  Description of Artificial Sequence: Synthetic oligonucleotide
cauaauuuccaauauguaccagaccuu

SEQ ID NO: 318 - RNA, 27 nt, Artificial Sequence
  Description of Artificial Sequence: Synthetic oligonucleotide
cuagugcuuccaucggaaggacuaggu

SEQ ID NO: 319 - RNA, 27 nt, Artificial Sequence
  Description of Artificial Sequence: Synthetic oligonucleotide
uccacauaaaaacaauauucacuggga

SEQ ID NO: 320 - RNA, 27 nt, Artificial Sequence
  Description of Artificial Sequence: Synthetic oligonucleotide
ucuaccaauuccaacuugaauucauug

SEQ ID NO: 321 - RNA, 27 nt, Artificial Sequence
  Description of Artificial Sequence: Synthetic oligonucleotide
ucuccaagucuaaaucuguguccugag

SEQ ID NO: 322 - RNA, 27 nt, Artificial Sequence
  Description of Artificial Sequence: Synthetic oligonucleotide
uggaauacuguaacugugcuuugagga

SEQ ID NO: 323 - RNA, 27 nt, Artificial Sequence
  Description of Artificial Sequence: Synthetic oligonucleotide
uuaauucaucagugguggcagugguag

SEQ ID NO: 324 - RNA, 27 nt, Artificial Sequence
  Description of Artificial Sequence: Synthetic oligonucleotide
gugaugauguggcacuaguaguuucuu

SEQ ID NO: 325 - RNA, 27 nt, Artificial Sequence
  Description of Artificial Sequence: Synthetic oligonucleotide
ucuguuuggugaggcuguccgacuuug

SEQ ID NO: 326 - RNA, 27 nt, Artificial Sequence
  Description of Artificial Sequence: Synthetic oligonucleotide
ccaucauguuccauuuuucgcuuucuc

SEQ ID NO: 327 - RNA, 27 nt, Artificial Sequence
  Description of Artificial Sequence: Synthetic oligonucleotide
gcagucuacaugcuaaaucagagggua

SEQ ID NO: 328 - RNA, 27 nt, Artificial Sequence
  Description of Artificial Sequence: Synthetic oligonucleotide
cauaaauagauccuuaaauagcucaaa

SEQ ID NO: 329 - RNA, 27 nt, Artificial Sequence
  Description of Artificial Sequence: Synthetic oligonucleotide
ugauaauagugcuuuuucaccuuuuuc

SEQ ID NO: 330 - RNA, 27 nt, Artificial Sequence
  Description of Artificial Sequence: Synthetic oligonucleotide
gcagaacugauaauagugcuuuuucac

SEQ ID NO: 331 - RNA, 27 nt, Artificial Sequence
  Description of Artificial Sequence: Synthetic oligonucleotide
guagguuuaaucuuucuuuucagccau

SEQ ID NO: 332 - RNA, 27 nt, Artificial Sequence
  Description of Artificial Sequence: Synthetic oligonucleotide
agaaggauuuuauuauaaggguuuaau

SEQ ID NO: 333 - RNA, 27 nt, Artificial Sequence
  Description of Artificial Sequence: Synthetic oligonucleotide
gucuacagcauuggcuaauaguaugaa

SEQ ID NO: 334 - RNA, 27 nt, Artificial Sequence
  Description of Artificial Sequence: Synthetic oligonucleotide
cuauuccuaucaaaaugcuucugucua

SEQ ID NO: 335 - RNA, 27 nt, Artificial Sequence
  Description of Artificial Sequence: Synthetic oligonucleotide
ucagggccauuaucuuauuugcucuau

SEQ ID NO: 336 - RNA, 27 nt, Artificial Sequence
  Description of Artificial Sequence: Synthetic oligonucleotide
ugcuugaggaagagaaaaauguugguc

SEQ ID NO: 337 - RNA, 27 nt, Artificial Sequence
  Description of Artificial Sequence: Synthetic oligonucleotide
ugggcugaacuuuucucauacuuaaag

SEQ ID NO: 338 - RNA, 27 nt, Artificial Sequence
  Description of Artificial Sequence: Synthetic oligonucleotide
gguucagcagccaucuuuauuccugcg

SEQ ID NO: 339 - RNA, 27 nt, Artificial Sequence
  Description of Artificial Sequence: Synthetic oligonucleotide
ugaagagaacuuggucauucaaauuuc

SEQ ID NO: 340 - RNA, 27 nt, Artificial Sequence
  Description of Artificial Sequence: Synthetic oligonucleotide
cucuaggcuggcuaucuuuauacauac

SEQ ID NO: 341 - RNA, 27 nt, Artificial Sequence
  Description of Artificial Sequence: Synthetic oligonucleotide
acacuucacagagauaguuacagccau

SEQ ID NO: 342 - RNA, 27 nt, Artificial Sequence
  Description of Artificial Sequence: Synthetic oligonucleotide
uugaaauuuucucacacuucacagaga

SEQ ID NO: 343 - RNA, 27 nt, Artificial Sequence
  Description of Artificial Sequence: Synthetic oligonucleotide
ucaggaggauucauuuccuuaaaggaa

SEQ ID NO: 344 - RNA, 27 nt, Artificial Sequence
  Description of Artificial Sequence: Synthetic oligonucleotide
auaugaugucacuuuuuguauccuuga

SEQ ID NO: 345 - RNA, 27 nt, Artificial Sequence
  Description of Artificial Sequence: Synthetic oligonucleotide
uaugaugaagauucaaauugcaucuua

SEQ ID NO: 346 - RNA, 27 nt, Artificial Sequence
  Description of Artificial Sequence: Synthetic oligonucleotide
uuaauagcuagucuucguuuugaacag

SEQ ID NO: 347 - RNA, 27 nt, Artificial Sequence
  Description of Artificial Sequence: Synthetic oligonucleotide
auuuuuaguagagaugagguuucacca

SEQ ID NO: 348 - RNA, 27 nt, Artificial Sequence
  Description of Artificial Sequence: Synthetic oligonucleotide
aggcgagauagagcuucucuuucguuc

SEQ ID NO: 349 - RNA, 27 nt, Artificial Sequence
  Description of Artificial Sequence: Synthetic oligonucleotide
aacuggaccgaaggcgcuuguggagaa

SEQ ID NO: 350 - RNA, 27 nt, Artificial Sequence
  Description of Artificial Sequence: Synthetic oligonucleotide
gcggcuacaucuuuggaaucuucuccu

SEQ ID NO: 351 - RNA, 27 nt, Artificial Sequence
  Description of Artificial Sequence: Synthetic oligonucleotide
caagucuccucauugaauccagauugg

SEQ ID NO: 352 - RNA, 27 nt, Artificial Sequence
  Description of Artificial Sequence: Synthetic oligonucleotide
uccucacuacucucaaaucuguucugg

SEQ ID NO: 353 - RNA, 27 nt, Artificial Sequence
  Description of Artificial Sequence: Synthetic oligonucleotide
uuuguacucaucugcacagcucuggcu

SEQ ID NO: 354 - RNA, 27 nt, Artificial Sequence
  Description of Artificial Sequence: Synthetic oligonucleotide
gcccauuaacaacaacaaucugaggug

SEQ ID NO: 355 - RNA, 27 nt, Artificial Sequence
  Description of Artificial Sequence: Synthetic oligonucleotide
aauaaauuaaaaauaauuaaaauagug

SEQ ID NO: 356 - RNA, 27 nt, Artificial Sequence
  Description of Artificial Sequence: Synthetic oligonucleotide
cauauuuaaauauuaauaaauuaaaaa

SEQ ID NO: 357 - RNA, 27 nt, Artificial Sequence
  Description of Artificial Sequence: Synthetic oligonucleotide
gaaacaaaggauauucaaacugcauag

SEQ ID NO: 358 - RNA, 27 nt, Artificial Sequence
  Description of Artificial Sequence: Synthetic oligonucleotide
caaacacuuagacgccagcagcauggg

SEQ ID NO: 359 - RNA, 27 nt, Artificial Sequence
  Description of Artificial Sequence: Synthetic oligonucleotide
uuugucacaggugaaaugcacaucuga

SEQ ID NO: 360 - RNA, 27 nt, Artificial Sequence
  Description of Artificial Sequence: Synthetic oligonucleotide
uaauucagccuggcacagguuuugauc

SEQ ID NO: 361 - RNA, 27 nt, Artificial Sequence
  Description of Artificial Sequence: Synthetic oligonucleotide
auuguaagaaugacuacccacauucac

SEQ ID NO: 362 - RNA, 27 nt, Artificial Sequence
  Description of Artificial Sequence: Synthetic oligonucleotide
caauuguaagaaugacuacccacauuc

SEQ ID NO: 363 - RNA, 27 nt, Artificial Sequence
  Description of Artificial Sequence: Synthetic oligonucleotide
guacacucucugaugcucauuuucaua

SEQ ID NO: 364 - RNA, 27 nt, Artificial Sequence
  Description of Artificial Sequence: Synthetic oligonucleotide
cugcugaguucuacaugaaaagcaaau

SEQ ID NO: 365 - RNA, 27 nt, Artificial Sequence
  Description of Artificial Sequence: Synthetic oligonucleotide
uacugaaaauaaauauagaaauacaac

SEQ ID NO: 366 - RNA, 27 nt, Artificial Sequence
  Description of Artificial Sequence: Synthetic oligonucleotide
uuccauuuaagaaacauuaaucaaaac

SEQ ID NO: 367 - RNA, 27 nt, Artificial Sequence
  Description of Artificial Sequence: Synthetic oligonucleotide
acaauuuuaggcacuauacacguuguu

SEQ ID NO: 368 - RNA, 27 nt, Artificial Sequence
  Description of Artificial Sequence: Synthetic oligonucleotide
ccagauguuaguagccaaggauauggu

SEQ ID NO: 369 - RNA, 27 nt, Artificial Sequence
  Description of Artificial Sequence: Synthetic oligonucleotide
agcucacagucuccagauguuaguagc

SEQ ID NO: 370 - RNA, 27 nt, Artificial Sequence
  Description of Artificial Sequence: Synthetic oligonucleotide
auuaauaaaaagcacacaacuuauggc

SEQ ID NO: 371 - RNA, 27 nt, Artificial Sequence
  Description of Artificial Sequence: Synthetic oligonucleotide
aauguaagaagagccaaaaugaugcau

SEQ ID NO: 372 - RNA, 27 nt, Artificial Sequence
  Description of Artificial Sequence: Synthetic oligonucleotide
acauuuuuacaaauguaagaagagcca

SEQ ID NO: 373 - RNA, 27 nt, Artificial Sequence
  Description of Artificial Sequence: Synthetic oligonucleotide
aauaugaauuaagaugaccuaaucugu

SEQ ID NO: 374 - RNA, 27 nt, Artificial Sequence
  Description of Artificial Sequence: Synthetic oligonucleotide
ucaugauuaguucuuucaauuccaucc

SEQ ID NO: 375 - RNA, 27 nt, Artificial Sequence
  Description of Artificial Sequence: Synthetic oligonucleotide
cccaagagcagaaggaaugagugugca

SEQ ID NO: 376 - RNA, 27 nt, Artificial Sequence
  Description of Artificial Sequence: Synthetic oligonucleotide
cucaaagcuacugguuaccucuacacc

SEQ ID NO: 377 - RNA, 27 nt, Artificial Sequence
  Description of Artificial Sequence: Synthetic oligonucleotide
ugaaauauuacguggcaugugguuggg

SEQ ID NO: 378 - RNA, 27 nt, Artificial Sequence
  Description of Artificial Sequence: Synthetic oligonucleotide
agugaagagaauaacuuguuuccgaag

SEQ ID NO: 379 - RNA, 27 nt, Artificial Sequence
  Description of Artificial Sequence: Synthetic oligonucleotide
uuucuuagcauuaguuauugggaguga

SEQ ID NO: 380 - RNA, 27 nt, Artificial Sequence
  Description of Artificial Sequence: Synthetic oligonucleotide
uugauuuucagcauuucuuagcauuag

SEQ ID NO: 381 - RNA, 27 nt, Artificial Sequence
  Description of Artificial Sequence: Synthetic oligonucleotide
aaaguaaucauauuuagagaaagacag

SEQ ID NO: 382 - RNA, 27 nt, Artificial Sequence
  Description of Artificial Sequence: Synthetic oligonucleotide
uguagaacaaaaugccugaaauucagc

SEQ ID NO: 383 - RNA, 27 nt, Artificial Sequence
  Description of Artificial Sequence: Synthetic oligonucleotide
gagagucccgggugagagggaaucgcc

SEQ ID NO: 384 - RNA, 27 nt, Artificial Sequence
  Description of Artificial Sequence: Synthetic oligonucleotide
cuuuacuuuaaagguucacuuuccuug

SEQ ID NO: 385 - RNA, 27 nt, Artificial Sequence
  Description of Artificial Sequence: Synthetic oligonucleotide
ccaggcuuccagagcaugcagccuccu

SEQ ID NO: 386 - RNA, 27 nt, Artificial Sequence
  Description of Artificial Sequence: Synthetic oligonucleotide
cucucuuuuguuuucuguucagagaaa

SEQ ID NO: 387 - RNA, 27 nt, Artificial Sequence
  Description of Artificial Sequence: Synthetic oligonucleotide
cggcauaacugauuacagccaaguuca

SEQ ID NO: 388 - RNA, 27 nt, Artificial Sequence
  Description of Artificial Sequence: Synthetic oligonucleotide
uggacuucuuuuaauuuuggcuucuuc

SEQ ID NO: 389 - RNA, 27 nt, Artificial Sequence
  Description of Artificial Sequence: Synthetic oligonucleotide
uaaccucaccuggacuucuuuuaauuu

SEQ ID NO: 390 - RNA, 27 nt, Artificial Sequence
  Description of Artificial Sequence: Synthetic oligonucleotide
guccucuucccgauaauccggauucag

SEQ ID NO: 391 - RNA, 27 nt, Artificial Sequence
  Description of Artificial Sequence: Synthetic oligonucleotide
acaauacuugcuuugaugucacauuaa

SEQ ID NO: 392 - RNA, 27 nt, Artificial Sequence
  Description of Artificial Sequence: Synthetic oligonucleotide
gagugcuacaauacuugcuuugauguc

SEQ ID NO: 393 - RNA, 27 nt, Artificial Sequence
  Description of Artificial Sequence: Synthetic oligonucleotide
auuugugguuuuguuuucucucucucu

SEQ ID NO: 394 - RNA, 27 nt, Artificial Sequence
  Description of Artificial Sequence: Synthetic oligonucleotide
uguaugggcuuaaauacuacagcgagg

SEQ ID NO: 395 - RNA, 27 nt, Artificial Sequence
  Description of Artificial Sequence: Synthetic oligonucleotide
cuguaugggcuuaaauacuacagcgag

SEQ ID NO: 396 - RNA, 27 nt, Artificial Sequence
  Description of Artificial Sequence: Synthetic oligonucleotide
ggaagguuucuguaugggcuuaaauac

SEQ ID NO: 397 - RNA, 27 nt, Artificial Sequence
  Description of Artificial Sequence: Synthetic oligonucleotide
guagguauaccauguuuauuuuaauac

SEQ ID NO: 398 - RNA, 27 nt, Artificial Sequence
  Description of Artificial Sequence: Synthetic oligonucleotide
uccgaaaacuggccgaucagaacagcc

SEQ ID NO: 399 - RNA, 27 nt, Artificial Sequence
  Description of Artificial Sequence: Synthetic oligonucleotide
cccuguuccaaaguucaaauuauuugu

SEQ ID NO: 400 - RNA, 27 nt, Artificial Sequence
  Description of Artificial Sequence: Synthetic oligonucleotide
acuggaaaguuaaauuaaggucgcaau

SEQ ID NO: 401 - RNA, 27 nt, Artificial Sequence
  Description of Artificial Sequence: Synthetic oligonucleotide
caaaaccaaacuuuagcuuucucagcc

SEQ ID NO: 402 - RNA, 27 nt, Artificial Sequence
  Description of Artificial Sequence: Synthetic oligonucleotide
uacagugggaaguagcaucuuuacuuu

SEQ ID NO: 403 - RNA, 27 nt, Artificial Sequence
  Description of Artificial Sequence: Synthetic oligonucleotide
ucauaugguaucagcaauuaagcagua

SEQ ID NO: 404 - RNA, 27 nt, Artificial Sequence
  Description of Artificial Sequence: Synthetic oligonucleotide
cagcccauguuucauucauaugguauc

SEQ ID NO: 405 - RNA, 27 nt, Artificial Sequence
  Description of Artificial Sequence: Synthetic oligonucleotide
uaugaaaaaguuggauaagaaaguugg

SEQ ID NO: 406 - RNA, 27 nt, Artificial Sequence
  Description of Artificial Sequence: Synthetic oligonucleotide
uccggccucaugaugucaugcaaggcu

SEQ ID NO: 407 - RNA, 27 nt, Artificial Sequence
  Description of Artificial Sequence: Synthetic oligonucleotide
acaaaugcagucauauacaaauucagg

SEQ ID NO: 408 - RNA, 27 nt, Artificial Sequence
  Description of Artificial Sequence: Synthetic oligonucleotide
gguaguaaacauucuacuaggauucuu

SEQ ID NO: 409 - RNA, 27 nt, Artificial Sequence
  Description of Artificial Sequence: Synthetic oligonucleotide
uuucaucaaaaaauucuucccuuucug

SEQ ID NO: 410 - RNA, 27 nt, Artificial Sequence
  Description of Artificial Sequence: Synthetic oligonucleotide
aaauucacacacuggcaugccgauagc

SEQ ID NO: 411 - RNA, 27 nt, Artificial Sequence
  Description of Artificial Sequence: Synthetic oligonucleotide
acauacauugcucuacuaugaggugaa

SEQ ID NO: 412 - RNA, 27 nt, Artificial Sequence
  Description of Artificial Sequence: Synthetic oligonucleotide
uauauaugugcuuuggcaauucuggug

SEQ ID NO: 413 - RNA, 27 nt, Artificial Sequence
  Description of Artificial Sequence: Synthetic oligonucleotide
ggagaaacuauuacccagaucaccacu

SEQ ID NO: 414 - RNA, 27 nt, Artificial Sequence
  Description of Artificial Sequence: Synthetic oligonucleotide
auuuggagaaacuauuacccagaucac

SEQ ID NO: 415 - RNA, 27 nt, Artificial Sequence
  Description of Artificial Sequence: Synthetic oligonucleotide
uuucuaggaaguauucaucacauccac

SEQ ID NO: 416 - RNA, 27 nt, Artificial Sequence
  Description of Artificial Sequence: Synthetic oligonucleotide
cauauaugguguagcuguggaaaugcg

SEQ ID NO: 417 - RNA, 27 nt, Artificial Sequence
  Description of Artificial Sequence: Synthetic oligonucleotide
cuccauucauauaugguguagcugugg

SEQ ID NO: 418 - RNA, 27 nt, Artificial Sequence
  Description of Artificial Sequence: Synthetic oligonucleotide
aucuucuucucguguaagaacugcagc

SEQ ID NO: 419 - RNA, 27 nt, Artificial Sequence
  Description of Artificial Sequence: Synthetic oligonucleotide
ucccuguaaaugaucuucuucucgugu

SEQ ID NO: 420 - RNA, 27 nt, Artificial Sequence
  Description of Artificial Sequence: Synthetic oligonucleotide
gucccuguaaaugaucuucuucucgug

SEQ ID NO: 421 - RNA, 27 nt, Artificial Sequence
  Description of Artificial Sequence: Synthetic oligonucleotide
ucaggucccuguaaaugaucuucuucu

SEQ ID NO: 422 - RNA, 27 nt, Artificial Sequence
  Description of Artificial Sequence: Synthetic oligonucleotide
gaugcagucaaacaccucuuccucugu

SEQ ID NO: 423 - RNA, 27 nt, Artificial Sequence
  Description of Artificial Sequence: Synthetic oligonucleotide
cgaugcagucaaacaccucuuccucug

SEQ ID NO: 424 - RNA, 27 nt, Artificial Sequence
  Description of Artificial Sequence: Synthetic oligonucleotide
cccugugaacucgcccucaaaguagcg

SEQ ID NO: 425 - RNA, 27 nt, Artificial Sequence
  Description of Artificial Sequence: Synthetic oligonucleotide
ggacagaggugccaggagaugcccuca

SEQ ID NO: 426 - RNA, 27 nt, Artificial Sequence
  Description of Artificial Sequence: Synthetic oligonucleotide
uuaaaaagacaaaccauaucacuccuu

SEQ ID NO: 427 - RNA, 27 nt, Artificial Sequence
  Description of Artificial Sequence: Synthetic oligonucleotide
cuuaaaaagacaaaccauaucacuccu

SEQ ID NO: 428 - RNA, 27 nt, Artificial Sequence
  Description of Artificial Sequence: Synthetic oligonucleotide
gacaaccuuuaggaucuuuacugcaac

SEQ ID NO: 429 - RNA, 27 nt, Artificial Sequence
  Description of Artificial Sequence: Synthetic oligonucleotide
gucgacaaccuuuaggaucuuuacugc

SEQ ID NO: 430 - RNA, 27 nt, Artificial Sequence
  Description of Artificial Sequence: Synthetic oligonucleotide
acaauugccagguuguccuuugucaug

SEQ ID NO: 431 - RNA, 27 nt, Artificial Sequence
  Description of Artificial Sequence: Synthetic oligonucleotide
ccucgcaccacugggucacaauugcca

SEQ ID NO: 432 - RNA, 27 nt, Artificial Sequence
  Description of Artificial Sequence: Synthetic oligonucleotide
auuucaugucucuauggaugauguucu

SEQ ID NO: 433 - RNA, 27 nt, Artificial Sequence
  Description of Artificial Sequence: Synthetic oligonucleotide
uggagaaauauauuguuggauuucaug

SEQ ID NO: 434 - RNA, 27 nt, Artificial Sequence
  Description of Artificial Sequence: Synthetic oligonucleotide
agccuucauggagaaauauauuguugg

SEQ ID NO: 435 - RNA, 27 nt, Artificial Sequence
  Description of Artificial Sequence: Synthetic oligonucleotide
accacuccagcgugacuuuacuguugc

SEQ ID NO: 436 - RNA, 27 nt, Artificial Sequence
  Description of Artificial Sequence: Synthetic oligonucleotide
ccucucuuccuuuacuuucuucacaca

SEQ ID NO: 437 - RNA, 27 nt, Artificial Sequence
  Description of Artificial Sequence: Synthetic oligonucleotide
gcccgaugcaaggauggcucggaagcg

SEQ ID NO: 438 - RNA, 27 nt, Artificial Sequence
  Description of Artificial Sequence: Synthetic oligonucleotide
cacaguaggauauucaaccuccauuuc

SEQ ID NO: 439 - RNA, 27 nt, Artificial Sequence
  Description of Artificial Sequence: Synthetic oligonucleotide
uuacacaguaggauauucaaccuccau

SEQ ID NO: 440 - RNA, 27 nt, Artificial Sequence
  Description of Artificial Sequence: Synthetic oligonucleotide
uacacuacaagggaaaacucaaaaucu

SEQ ID NO: 441 - RNA, 27 nt, Artificial Sequence
  Description of Artificial Sequence: Synthetic oligonucleotide
caaucaacaaagaacaaacaggauaaa

SEQ ID NO: 442 - RNA, 27 nt, Artificial Sequence
  Description of Artificial Sequence: Synthetic oligonucleotide
uuucaaucaacaaagaacaaacaggau

SEQ ID NO: 443 - RNA, 27 nt, Artificial Sequence
  Description of Artificial Sequence: Synthetic oligonucleotide
auggaagaaaaagaaggcuguagagaa

SEQ ID NO: 444 - RNA, 27 nt, Artificial Sequence
  Description of Artificial Sequence: Synthetic oligonucleotide
uagaaggaagauuagcuauggaagaaa

SEQ ID NO: 445 - RNA, 27 nt, Artificial Sequence
  Description of Artificial Sequence: Synthetic oligonucleotide
augaagcauucaacaggaagauuauuu

SEQ ID NO: 446 - RNA, 27 nt, Artificial Sequence
  Description of Artificial Sequence: Synthetic oligonucleotide
caugaagcauucaacaggaagauuauu

SEQ ID NO: 447 - RNA, 27 nt, Artificial Sequence
  Description of Artificial Sequence: Synthetic oligonucleotide
ucaaaguagaauucaagucaugaagca

SEQ ID NO: 448 - RNA, 27 nt, Artificial Sequence
  Description of Artificial Sequence: Synthetic oligonucleotide
gucuguaguugcuucucucccucuuag

SEQ ID NO: 449 - RNA, 27 nt, Artificial Sequence
  Description of Artificial Sequence: Synthetic oligonucleotide
guugaccuuggucugguaggagacggc

SEQ ID NO: 450 - RNA, 27 nt, Artificial Sequence
  Description of Artificial Sequence: Synthetic oligonucleotide
gucgagauagucgggccgauugaucuc

SEQ ID NO: 451 - RNA, 27 nt, Artificial Sequence
  Description of Artificial Sequence: Synthetic oligonucleotide
guuugggaagguuggauguucguccuc

SEQ ID NO: 452 - RNA, 27 nt, Artificial Sequence
  Description of Artificial Sequence: Synthetic oligonucleotide
aguucuaagcuuggguuccgacccuaa

SEQ ID NO: 453 - RNA, 27 nt, Artificial Sequence
  Description of Artificial Sequence: Synthetic oligonucleotide
uuaaaguucuaagcuuggguuccgacc

SEQ ID NO: 454 - RNA, 27 nt, Artificial Sequence
  Description of Artificial Sequence: Synthetic oligonucleotide
guugcuuaaaguucuaagcuuggguuc

SEQ ID NO: 455 - RNA, 27 nt, Artificial Sequence
  Description of Artificial Sequence: Synthetic oligonucleotide
gugguggucuuguugcuuaaaguucua

SEQ ID NO: 456 - RNA, 27 nt, Artificial Sequence
  Description of Artificial Sequence: Synthetic oligonucleotide
acuuuauuucucgccacugaauaguag

SEQ ID NO: 457 - RNA, 27 nt, Artificial Sequence
  Description of Artificial Sequence: Synthetic oligonucleotide
aacuuuauuucucgccacugaauagua

SEQ ID NO: 458 - RNA, 27 nt, Artificial Sequence
  Description of Artificial Sequence: Synthetic oligonucleotide
ggaucauuuccuguuaucuguguuugu

SEQ ID NO: 459 - RNA, 27 nt, Artificial Sequence
  Description of Artificial Sequence: Synthetic oligonucleotide
guuucauuucuucucuuuucuuaaggc

SEQ ID NO: 460 - RNA, 27 nt, Artificial Sequence
  Description of Artificial Sequence: Synthetic oligonucleotide
ggaggauggaaacacacuccuucaguu

SEQ ID NO: 461 - RNA, 27 nt, Artificial Sequence
  Description of Artificial Sequence: Synthetic oligonucleotide
ucaaagauuuucagucccgcggugaca

SEQ ID NO: 462 - RNA, 27 nt, Artificial Sequence
  Description of Artificial Sequence: Synthetic oligonucleotide
ccugaacggcacgcuuauuucugcugu

SEQ ID NO: 463 - RNA, 27 nt, Artificial Sequence
  Description of Artificial Sequence: Synthetic oligonucleotide
cuucuggacccugaacggcacgcuuau

SEQ ID NO: 464 - RNA, 27 nt, Artificial Sequence
  Description of Artificial Sequence: Synthetic oligonucleotide
caagcagucuugagugacuguuucuuc

SEQ ID NO: 465 - RNA, 27 nt, Artificial Sequence
  Description of Artificial Sequence: Synthetic oligonucleotide
ccaaagacauggaccuucuuccucuga

SEQ ID NO: 466 - RNA, 27 nt, Artificial Sequence
  Description of Artificial Sequence: Synthetic oligonucleotide
guguuucaggcauauuuugaauacauc

SEQ ID NO: 467 - RNA, 27 nt, Artificial Sequence
  Description of Artificial Sequence: Synthetic oligonucleotide
gagguacagagaaagggaggaaaauag

SEQ ID NO: 468 - RNA, 27 nt, Artificial Sequence
  Description of Artificial Sequence: Synthetic oligonucleotide
ucuugucuugcucuaucuuucuuuggu

SEQ ID NO: 469 - RNA, 27 nt, Artificial Sequence
  Description of Artificial Sequence: Synthetic oligonucleotide
uuucuugucuugcucuaucuuucuuug

SEQ ID NO: 470 - RNA, 27 nt, Artificial Sequence
  Description of Artificial Sequence: Synthetic oligonucleotide
ggaucuuguacaaacaaaugcuuucuc

SEQ ID NO: 471 - RNA, 27 nt, Artificial Sequence
  Description of Artificial Sequence: Synthetic oligonucleotide
ucugcaaguacguucguuuaacucaag

SEQ ID NO: 472 - RNA, 27 nt, Artificial Sequence
  Description of Artificial Sequence: Synthetic oligonucleotide
ucuguaucgaucguucuguaucagucu

SEQ ID NO: 473 - RNA, 27 nt, Artificial Sequence
  Description of Artificial Sequence: Synthetic oligonucleotide
auuuauuuuuauauauauauaauauau

SEQ ID NO: 474 - RNA, 27 nt, Artificial Sequence
  Description of Artificial Sequence: Synthetic oligonucleotide
auauuuauuuuuauauauauauaauau

SEQ ID NO: 475 - RNA, 27 nt, Artificial Sequence
  Description of Artificial Sequence: Synthetic oligonucleotide
cacagcagucaaauacauccagugaag

SEQ ID NO: 476 - RNA, 27 nt, Artificial Sequence
  Description of Artificial Sequence: Synthetic oligonucleotide
gucucucaucuccuccucuucccuguc

SEQ ID NO: 477 - RNA, 27 nt, Artificial Sequence
  Description of Artificial Sequence: Synthetic oligonucleotide
ccaagugggacaaaaaaaagaucaugc

SEQ ID NO: 478 - RNA, 14 nt, Artificial Sequence
  Description of Artificial Sequence: Synthetic oligonucleotide
guauuuugaugagg

SEQ ID NO: 479 - RNA, 12 nt, Artificial Sequence
  Description of Artificial Sequence: Synthetic oligonucleotide
ggcccagaugau

SEQ ID NO: 480 - RNA, 14 nt, Artificial Sequence
  Description of Artificial Sequence: Synthetic oligonucleotide
gggaagaaaacuau

SEQ ID NO: 481 - RNA, 15 nt, Artificial Sequence
  Description of Artificial Sequence: Synthetic oligonucleotide
guuuuaauuuauuuc

SEQ ID NO: 482 - RNA, 12 nt, Artificial Sequence
  Description of Artificial Sequence: Synthetic oligonucleotide
acguagggaaau

SEQ ID NO: 483 - RNA, 12 nt, Artificial Sequence
  Description of Artificial Sequence: Synthetic oligonucleotide
ccaggguuuacc

SEQ ID NO: 484 - RNA, 11 nt, Artificial Sequence
  Description of Artificial Sequence: Synthetic oligonucleotide
agcaagguuua

SEQ ID NO: 485 - RNA, 12 nt, Artificial Sequence
  Description of Artificial Sequence: Synthetic oligonucleotide
uguauuauguug

SEQ ID NO: 486 - RNA, 15 nt, Artificial Sequence
  Description of Artificial Sequence: Synthetic oligonucleotide
uuuuaaucuuuguga

SEQ ID NO: 487 - RNA, 14 nt, Artificial Sequence
  Description of Artificial Sequence: Synthetic oligonucleotide
uuaaucuuugugac

SEQ ID NO: 488 - RNA, 13 nt, Artificial Sequence
  Description of Artificial Sequence: Synthetic oligonucleotide
gcugcuuaugucu

SEQ ID NO: 489 - RNA, 14 nt, Artificial Sequence
  Description of Artificial Sequence: Synthetic oligonucleotide
aaguguuucagaag

SEQ ID NO: 490 - RNA, 13 nt, Artificial Sequence
  Description of Artificial Sequence: Synthetic oligonucleotide
gaccaucaauaag

SEQ ID NO: 491 - RNA, 13 nt, Artificial Sequence
  Description of Artificial Sequence: Synthetic oligonucleotide
ccaucaauaagga

SEQ ID NO: 492 - RNA, 14 nt, Artificial Sequence
  Description of Artificial Sequence: Synthetic oligonucleotide
ucaauaaggaagaa

SEQ ID NO: 493 - RNA, 14 nt, Artificial Sequence
  Description of Artificial Sequence: Synthetic oligonucleotide
aauaaggaagaagc

SEQ ID NO: 494 - RNA, 13 nt, Artificial Sequence
  Description of Artificial Sequence: Synthetic oligonucleotide
aggaagaagcccu

SEQ ID NO: 495 - RNA, 13 nt, Artificial Sequence
  Description of Artificial Sequence: Synthetic oligonucleotide
gcauaacuaaagg

SEQ ID NO: 496 - RNA, 14 nt, Artificial Sequence
  Description of Artificial Sequence: Synthetic oligonucleotide
cauaacuaaaggug

SEQ ID NO: 497 - RNA, 12 nt, Artificial Sequence
  Description of Artificial Sequence: Synthetic oligonucleotide
cuacaucacgcc

SEQ ID NO: 498 - RNA, 12 nt, Artificial Sequence
  Description of Artificial Sequence: Synthetic oligonucleotide
acuggauuuaag

SEQ ID NO: 499 - RNA, 12 nt, Artificial Sequence
  Description of Artificial Sequence: Synthetic oligonucleotide
cuggauuuaagc

SEQ ID NO: 500 - RNA, 13 nt, Artificial Sequence
  Description of Artificial Sequence: Synthetic oligonucleotide
gauuuaagcagag

SEQ ID NO: 501 - RNA, 13 nt, Artificial Sequence
  Description of Artificial Sequence: Synthetic oligonucleotide
auuuaagcagagu

SEQ ID NO: 502 - RNA, 13 nt, Artificial Sequence
  Description of Artificial Sequence: Synthetic oligonucleotide
uuaagcagaguuc

SEQ ID NO: 503 - RNA, 13 nt, Artificial Sequence
  Description of Artificial Sequence: Synthetic oligonucleotide
uaagcagaguuca

SEQ ID NO: 504 - RNA, 14 nt, Artificial Sequence
  Description of Artificial Sequence: Synthetic oligonucleotide
agcagaguucaaaa

SEQ ID NO: 505 - RNA, 12 nt, Artificial Sequence
  Description of Artificial Sequence: Synthetic oligonucleotide
cucagggucuga

SEQ ID NO: 506 - RNA, 13 nt, Artificial Sequence
  Description of Artificial Sequence: Synthetic oligonucleotide
caagcaacuacau

SEQ ID NO: 507 - RNA, 12 nt, Artificial Sequence
  Description of Artificial Sequence: Synthetic oligonucleotide
aucaauggcagc

SEQ ID NO: 508 - RNA, 11 nt, Artificial Sequence
  Description of Artificial Sequence: Synthetic oligonucleotide
uuccagcccac

SEQ ID NO: 509 - RNA, 12 nt, Artificial Sequence
  Description of Artificial Sequence: Synthetic oligonucleotide
cagcugagaaug

SEQ ID NO: 510 - RNA, 13 nt, Artificial Sequence
  Description of Artificial Sequence: Synthetic oligonucleotide
aacguaucuccua

SEQ ID NO: 511 - RNA, 14 nt, Artificial Sequence
  Description of Artificial Sequence: Synthetic oligonucleotide
ccuaaaauaauuuc

SEQ ID NO: 512 - RNA, 13 nt, Artificial Sequence
  Description of Artificial Sequence: Synthetic oligonucleotide
uggaagauucagc

SEQ ID NO: 513 - RNA, 12 nt, Artificial Sequence
  Description of Artificial Sequence: Synthetic oligonucleotide
uuaaacucuccu

SEQ ID NO: 514 - RNA, 12 nt, Artificial Sequence
  Description of Artificial Sequence: Synthetic oligonucleotide
cagccuacaguu

SEQ ID NO: 515 - RNA, 13 nt, Artificial Sequence
  Description of Artificial Sequence: Synthetic oligonucleotide
guuauguucaguc

SEQ ID NO: 516 - RNA, 13 nt, Artificial Sequence
  Description of Artificial Sequence: Synthetic oligonucleotide
cacauacaaaaug

SEQ ID NO: 517 - RNA, 9 nt, Artificial Sequence
  Description of Artificial Sequence: Synthetic oligonucleotide
uccuuuugc

SEQ ID NO: 518 - RNA, 12 nt, Artificial Sequence
  Description of Artificial Sequence: Synthetic oligonucleotide
ugaccugugaag

SEQ ID NO: 519 - RNA, 12 nt, Artificial Sequence
  Description of Artificial Sequence: Synthetic oligonucleotide
cuaucucacaca

SEQ ID NO: 520 - RNA, 13 nt, Artificial Sequence
  Description of Artificial Sequence: Synthetic oligonucleotide
uguccucaauugu

SEQ ID NO: 521 - RNA, 12 nt, Artificial Sequence
  Description of Artificial Sequence: Synthetic oligonucleotide
aaaccguagcug

SEQ ID NO: 522 - RNA, 12 nt, Artificial Sequence
  Description of Artificial Sequence: Synthetic oligonucleotide
uagcuggcaagc

SEQ ID NO: 523 - RNA, 14 nt, Artificial Sequence
  Description of Artificial Sequence: Synthetic oligonucleotide
uuguaugguuaaaa

SEQ ID NO: 524 - RNA, 14 nt, Artificial Sequence
  Description of Artificial Sequence: Synthetic oligonucleotide
ugguuaaaagaugg

SEQ ID NO: 525 - RNA, 13 nt, Artificial Sequence
  Description of Artificial Sequence: Synthetic oligonucleotide
cagggaauuauac

SEQ ID NO: 526 - RNA, 12 nt, Artificial Sequence
  Description of Artificial Sequence: Synthetic oligonucleotide
acaaucuugcug

SEQ ID NO: 527 - RNA, 13 nt, Artificial Sequence
  Description of Artificial Sequence: Synthetic oligonucleotide
ccaauaaugaaga

SEQ ID NO: 528 - RNA, 13 nt, Artificial Sequence
  Description of Artificial Sequence: Synthetic oligonucleotide
acuuuggauguuc

SEQ ID NO: 529 - RNA, 12 nt, Artificial Sequence
  Description of Artificial Sequence: Synthetic oligonucleotide
aaugcuuccacu

SEQ ID NO: 530 - RNA, 11 nt, Artificial Sequence
  Description of Artificial Sequence: Synthetic oligonucleotide
gagaaaguuug

SEQ ID NO: 531 - RNA, 11 nt, Artificial Sequence
  Description of Artificial Sequence: Synthetic oligonucleotide
aaagaacuacu

SEQ ID NO: 532 - RNA, 12 nt, Artificial Sequence
  Description of Artificial Sequence: Synthetic oligonucleotide
uuagaaauacgg

SEQ ID NO: 533 - RNA, 12 nt, Artificial Sequence
  Description of Artificial Sequence: Synthetic oligonucleotide
aacauggguaca

SEQ ID NO: 534 - RNA, 14 nt, Artificial Sequence
  Description of Artificial Sequence: Synthetic oligonucleotide
aaagacacagaaga

SEQ ID NO: 535 - RNA, 11 nt, Artificial Sequence
  Description of Artificial Sequence: Synthetic oligonucleotide
uaguagggagg

SEQ ID NO: 536 - RNA, 12 nt, Artificial Sequence
  Description of Artificial Sequence: Synthetic oligonucleotide
gccuucugcagc

SEQ ID NO: 537 - RNA, 10 nt, Artificial Sequence
  Description of Artificial Sequence: Synthetic oligonucleotide
ggucugguac

SEQ ID NO: 538 - RNA, 12 nt, Artificial Sequence
  Description of Artificial Sequence: Synthetic oligonucleotide
cuaguccuuccg

SEQ ID NO: 539 - RNA, 12 nt, Artificial Sequence
  Description of Artificial Sequence: Synthetic oligonucleotide
ccagugaauauu

SEQ ID NO: 540 - RNA, 13 nt, Artificial Sequence
  Description of Artificial Sequence: Synthetic oligonucleotide
augaauucaaguu

SEQ ID NO: 541 - RNA, 12 nt, Artificial Sequence
  Description of Artificial Sequence: Synthetic oligonucleotide
caggacacagau

SEQ ID NO: 542 - RNA, 12 nt, Artificial Sequence
  Description of Artificial Sequence: Synthetic oligonucleotide
cucaaagcacag

SEQ ID NO: 543 - RNA, 10 nt, Artificial Sequence
  Description of Artificial Sequence: Synthetic oligonucleotide
accacugcca

SEQ ID NO: 544 - RNA, 13 nt, Artificial Sequence
  Description of Artificial Sequence: Synthetic oligonucleotide
gaaacuacuagug

SEQ ID NO: 545 - RNA, 12 nt, Artificial Sequence
  Description of Artificial Sequence: Synthetic oligonucleotide
aagucggacagc

SEQ ID NO: 546 - RNA, 13 nt, Artificial Sequence
  Description of Artificial Sequence: Synthetic oligonucleotide
gaaagcgaaaaau

SEQ ID NO: 547 - RNA, 13 nt, Artificial Sequence
  Description of Artificial Sequence: Synthetic oligonucleotide
cccucugauuuag

SEQ ID NO: 548 - RNA, 12 nt, Artificial Sequence
  Description of Artificial Sequence: Synthetic oligonucleotide
ugagcuauuuaa

SEQ ID NO: 549 - RNA, 13 nt, Artificial Sequence
  Description of Artificial Sequence: Synthetic oligonucleotide
aaaaggugaaaaa

SEQ ID NO: 550 - RNA, 14 nt, Artificial Sequence
  Description of Artificial Sequence: Synthetic oligonucleotide
gaaaaagcacuauu

SEQ ID NO: 551 - RNA, 12 nt, Artificial Sequence
  Description of Artificial Sequence: Synthetic oligonucleotide
ggcugaaaagaa

SEQ ID NO: 552 - RNA, 12 nt, Artificial Sequence
  Description of Artificial Sequence: Synthetic oligonucleotide
uaaacccuuaua

SEQ ID NO: 553 - RNA, 13 nt, Artificial Sequence
  Description of Artificial Sequence: Synthetic oligonucleotide
cauacuauuagcc

SEQ ID NO: 554 - RNA, 12 nt, Artificial Sequence
  Description of Artificial Sequence: Synthetic oligonucleotide
gacagaagcauu

SEQ ID NO: 555 - RNA, 14 nt, Artificial Sequence
  Description of Artificial Sequence: Synthetic oligonucleotide
agagcaaauaagau

SEQ ID NO: 556 - RNA, 14 nt, Artificial Sequence
  Description of Artificial Sequence: Synthetic oligonucleotide
ccaacauuuuucuc

SEQ ID NO: 557 - RNA, 15 nt, Artificial Sequence
  Description of Artificial Sequence: Synthetic oligonucleotide
uuaaguaugagaaaa

SEQ ID NO: 558 - RNA, 14 nt, Artificial Sequence
  Description of Artificial Sequence: Synthetic oligonucleotide
caggaauaaagaug

SEQ ID NO: 559 - RNA, 13 nt, Artificial Sequence
  Description of Artificial Sequence: Synthetic oligonucleotide
aauuugaaugacc

SEQ ID NO: 560 - RNA, 14 nt, Artificial Sequence
  Description of Artificial Sequence: Synthetic oligonucleotide
auguauaaagauag

SEQ ID NO: 561 - RNA, 12 nt, Artificial Sequence
  Description of Artificial Sequence: Synthetic oligonucleotide
ggcuguaacuau

SEQ ID NO: 562 - RNA, 11 nt, Artificial Sequence
  Description of Artificial Sequence: Synthetic oligonucleotide
ucugugaagug

SEQ ID NO: 563 - RNA, 14 nt, Artificial Sequence
  Description of Artificial Sequence: Synthetic oligonucleotide
ccuuuaaggaaaug

SEQ ID NO: 564 - RNA, 13 nt, Artificial Sequence
  Description of Artificial Sequence: Synthetic oligonucleotide
aaggauacaaaaa

SEQ ID NO: 565 - RNA, 12 nt, Artificial Sequence
  Description of Artificial Sequence: Synthetic oligonucleotide
agaugcaauuug

SEQ ID NO: 566 - RNA, 12 nt, Artificial Sequence
  Description of Artificial Sequence: Synthetic oligonucleotide
guucaaaacgaa

SEQ ID NO: 567 - RNA, 11 nt, Artificial Sequence
  Description of Artificial Sequence: Synthetic oligonucleotide
gugaaaccuca

SEQ ID NO: 568 - RNA, 13 nt, Artificial Sequence
  Description of Artificial Sequence: Synthetic oligonucleotide
acgaaagagaagc

SEQ ID NO: 569 - RNA, 12 nt, Artificial Sequence
  Description of Artificial Sequence: Synthetic oligonucleotide
cuccacaagcgc

SEQ ID NO: 570 - RNA, 14 nt, Artificial Sequence
  Description of Artificial Sequence: Synthetic oligonucleotide
gagaagauuccaaa

SEQ ID NO: 571 - RNA, 13 nt, Artificial Sequence
  Description of Artificial Sequence: Synthetic oligonucleotide
aaucuggauucaa

SEQ ID NO: 572 - RNA, 13 nt, Artificial Sequence
  Description of Artificial Sequence: Synthetic oligonucleotide
agaacagauuuga

SEQ ID NO: 573 - RNA, 11 nt, Artificial Sequence
  Description of Artificial Sequence: Synthetic oligonucleotide
ccagagcugug

SEQ ID NO: 574 - RNA, 12 nt, Artificial Sequence
  Description of Artificial Sequence: Synthetic oligonucleotide
ccucagauuguu

SEQ ID NO: 575 - RNA, 12 nt, Artificial Sequence
  Description of Artificial Sequence: Synthetic oligonucleotide
cuauuuuaauua

SEQ ID NO: 576 - RNA, 13 nt, Artificial Sequence
  Description of Artificial Sequence: Synthetic oligonucleotide
uuuaauuuauuaa

SEQ ID NO: 577 - RNA, 12 nt, Artificial Sequence
  Description of Artificial Sequence: Synthetic oligonucleotide
augcaguuugaa

SEQ ID NO: 578 - RNA, 11 nt, Artificial Sequence
  Description of Artificial Sequence: Synthetic oligonucleotide
caugcugcugg

SEQ ID NO: 579 - RNA, 13 nt, Artificial Sequence
  Description of Artificial Sequence: Synthetic oligonucleotide
agaugugcauuuc

SEQ ID NO: 580 - RNA, 12 nt, Artificial Sequence
  Description of Artificial Sequence: Synthetic oligonucleotide
ucaaaaccugug

SEQ ID NO: 581 - RNA, 11 nt, Artificial Sequence
  Description of Artificial Sequence: Synthetic oligonucleotide
gaaugugggua

SEQ ID NO: 582 - RNA, 10 nt, Artificial Sequence
  Description of Artificial Sequence: Synthetic oligonucleotide
auguggguag

SEQ ID NO: 583 - RNA, 13 nt, Artificial Sequence
  Description of Artificial Sequence: Synthetic oligonucleotide
ugaaaaugagcau

SEQ ID NO: 584 - RNA, 13 nt, Artificial Sequence
  Description of Artificial Sequence: Synthetic oligonucleotide
uugcuuuucaugu

SEQ ID NO: 585 - RNA, 12 nt, Artificial Sequence
  Description of Artificial Sequence: Synthetic oligonucleotide
uguauuucuaua

SEQ ID NO: 586 - RNA, 13 nt, Artificial Sequence
  Description of Artificial Sequence: Synthetic oligonucleotide
uuugauuaauguu

SEQ ID NO: 587 - RNA, 12 nt, Artificial Sequence
  Description of Artificial Sequence: Synthetic oligonucleotide
caacguguauag

SEQ ID NO: 588 - RNA, 12 nt, Artificial Sequence
  Description of Artificial Sequence: Synthetic oligonucleotide
cauauccuuggc

SEQ ID NO: 589 - RNA, 13 nt, Artificial Sequence
  Description of Artificial Sequence: Synthetic oligonucleotide
uacuaacaucugg

SEQ ID NO: 590 - RNA, 11 nt, Artificial Sequence
  Description of Artificial Sequence: Synthetic oligonucleotide
cauaaguugug

SEQ ID NO: 591 - RNA, 12 nt, Artificial Sequence
  Description of Artificial Sequence: Synthetic oligonucleotide
gcaucauuuugg

SEQ ID NO: 592 - RNA, 10 nt, Artificial Sequence
  Description of Artificial Sequence: Synthetic oligonucleotide
gcucuucuua

SEQ ID NO: 593 - RNA, 10 nt, Artificial Sequence
  Description of Artificial Sequence: Synthetic oligonucleotide
agauuagguc

SEQ ID NO: 594 - RNA, 12 nt, Artificial Sequence
  Description of Artificial Sequence: Synthetic oligonucleotide
auggaauugaaa

SEQ ID NO: 595 - RNA, 13 nt, Artificial Sequence
  Description of Artificial Sequence: Synthetic oligonucleotide
cacacucauuccu

SEQ ID NO: 596 - RNA, 12 nt, Artificial Sequence
  Description of Artificial Sequence: Synthetic oligonucleotide
uguagagguaac

SEQ ID NO: 597 - RNA, 11 nt, Artificial Sequence
  Description of Artificial Sequence: Synthetic oligonucleotide
caaccacaugc

SEQ ID NO: 598 - RNA, 12 nt, Artificial Sequence
  Description of Artificial Sequence: Synthetic oligonucleotide
ucggaaacaagu

SEQ ID NO: 599 - RNA, 11 nt, Artificial Sequence
  Description of Artificial Sequence: Synthetic oligonucleotide
acucccaauaa

SEQ ID NO: 600 - RNA, 13 nt, Artificial Sequence
  Description of Artificial Sequence: Synthetic oligonucleotide
aaugcuaagaaau

SEQ ID NO: 601 - RNA, 11 nt, Artificial Sequence
  Description of Artificial Sequence: Synthetic oligonucleotide
gucuuucucua

SEQ ID NO: 602 - RNA, 11 nt, Artificial Sequence
  Description of Artificial Sequence: Synthetic oligonucleotide
ugaauuucagg

SEQ ID NO: 603 - RNA, 13 nt, Artificial Sequence
  Description of Artificial Sequence: Synthetic oligonucleotide
cgauucccucuca

SEQ ID NO: 604 - RNA, 11 nt, Artificial Sequence
  Description of Artificial Sequence: Synthetic oligonucleotide
aggaaagugaa

SEQ ID NO: 605 - RNA, 12 nt, Artificial Sequence
  Description of Artificial Sequence: Synthetic oligonucleotide
gaggcugcaugc

SEQ ID NO: 606 - RNA, 11 nt, Artificial Sequence
  Description of Artificial Sequence: Synthetic oligonucleotide
ucucugaacag

SEQ ID NO: 607 - RNA, 12 nt, Artificial Sequence
  Description of Artificial Sequence: Synthetic oligonucleotide
aacuuggcugua

SEQ ID NO: 608 - RNA, 12 nt, Artificial Sequence
  Description of Artificial Sequence: Synthetic oligonucleotide
agaagccaaaau

SEQ ID NO: 609 - RNA, 14 nt, Artificial Sequence
  Description of Artificial Sequence: Synthetic oligonucleotide
auuaaaagaagucc

SEQ ID NO: 610 - RNA, 14 nt, Artificial Sequence
  Description of Artificial Sequence: Synthetic oligonucleotide
gaauccggauuauc

SEQ ID NO: 611 - RNA, 12 nt, Artificial Sequence
  Description of Artificial Sequence: Synthetic oligonucleotide
aaugugacauca

SEQ ID NO: 612 - RNA, 13 nt, Artificial Sequence
  Description of Artificial Sequence: Synthetic oligonucleotide
caucaaagcaagu

SEQ ID NO: 613 - RNA, 11 nt, Artificial Sequence
  Description of Artificial Sequence: Synthetic oligonucleotide
agagagagaaa

SEQ ID NO: 614 - RNA, 13 nt, Artificial Sequence
  Description of Artificial Sequence: Synthetic oligonucleotide
ucgcuguaguauu

SEQ ID NO: 615 - RNA, 14 nt, Artificial Sequence
  Description of Artificial Sequence: Synthetic oligonucleotide
cgcuguaguauuua

SEQ ID NO: 616 - RNA, 13 nt, Artificial Sequence
  Description of Artificial Sequence: Synthetic oligonucleotide
auuuaagcccaua

SEQ ID NO: 617 - RNA, 15 nt, Artificial Sequence
  Description of Artificial Sequence: Synthetic oligonucleotide
auuaaaauaaacaug

SEQ ID NO: 618 - RNA, 12 nt, Artificial Sequence
  Description of Artificial Sequence: Synthetic oligonucleotide
cuguucugaucg

SEQ ID NO: 619 - RNA, 16 nt, Artificial Sequence
  Description of Artificial Sequence: Synthetic oligonucleotide
aaauaauuugaacuuu

SEQ ID NO: 620 - RNA, 12 nt, Artificial Sequence
  Description of Artificial Sequence: Synthetic oligonucleotide
ugcgaccuuaau

SEQ ID NO: 621 - RNA, 11 nt, Artificial Sequence
  Description of Artificial Sequence: Synthetic oligonucleotide
cugagaaagcu

SEQ ID NO: 622 - RNA, 13 nt, Artificial Sequence
  Description of Artificial Sequence: Synthetic oligonucleotide
aguaaagaugcua

SEQ ID NO: 623 - RNA, 12 nt, Artificial Sequence
  Description of Artificial Sequence: Synthetic oligonucleotide
cugcuuaauugc

SEQ ID NO: 624 - RNA, 14 nt, Artificial Sequence
  Description of Artificial Sequence: Synthetic oligonucleotide
uaccauaugaauga

SEQ ID NO: 625 - RNA, 12 nt, Artificial Sequence
  Description of Artificial Sequence: Synthetic oligonucleotide
aacuuucuuauc

SEQ ID NO: 626 - RNA, 13 nt, Artificial Sequence
  Description of Artificial Sequence: Synthetic oligonucleotide
ccuugcaugacau

SEQ ID NO: 627 - RNA, 14 nt, Artificial Sequence
  Description of Artificial Sequence: Synthetic oligonucleotide
ugaauuuguauaug

SEQ ID NO: 628 - RNA, 12 nt, Artificial Sequence
  Description of Artificial Sequence: Synthetic oligonucleotide
gaauccuaguag

SEQ ID NO: 629 - RNA, 10 nt, Artificial Sequence
  Description of Artificial Sequence: Synthetic oligonucleotide
gaaagggaag

SEQ ID NO: 630 - RNA, 11 nt, Artificial Sequence
  Description of Artificial Sequence: Synthetic oligonucleotide
uaucggcaugc

SEQ ID NO: 631 - RNA, 12 nt, Artificial Sequence
  Description of Artificial Sequence: Synthetic oligonucleotide
caccucauagua

SEQ ID NO: 632 - RNA, 11 nt, Artificial Sequence
  Description of Artificial Sequence: Synthetic oligonucleotide
ccagaauugcc

SEQ ID NO: 633 - RNA, 11 nt, Artificial Sequence
  Description of Artificial Sequence: Synthetic oligonucleotide
uggugaucugg

SEQ ID NO: 634 - RNA, 12 nt, Artificial Sequence
  Description of Artificial Sequence: Synthetic oligonucleotide
gaucuggguaau

SEQ ID NO: 635 - RNA, 12 nt, Artificial Sequence
  Description of Artificial Sequence: Synthetic oligonucleotide
ggaugugaugaa

SEQ ID NO: 636 - RNA, 12 nt, Artificial Sequence
  Description of Artificial Sequence: Synthetic oligonucleotide
cauuuccacagc

SEQ ID NO: 637 - RNA, 11 nt, Artificial Sequence
  Description of Artificial Sequence: Synthetic oligonucleotide
acagcuacacc

SEQ ID NO: 638 - RNA, 12 nt, Artificial Sequence
  Description of Artificial Sequence: Synthetic oligonucleotide
ugcaguucuuac

SEQ ID NO: 639 - RNA, 12 nt, Artificial Sequence
  Description of Artificial Sequence: Synthetic oligonucleotide
acgagaagaaga

SEQ ID NO: 640 - RNA, 12 nt, Artificial Sequence
  Description of Artificial Sequence: Synthetic oligonucleotide
cgagaagaagau

SEQ ID NO: 641 - RNA, 15 nt, Artificial Sequence
  Description of Artificial Sequence: Synthetic oligonucleotide
aagaagaucauuuac

SEQ ID NO: 642 - RNA, 11 nt, Artificial Sequence
  Description of Artificial Sequence: Synthetic oligonucleotide
agaggaagagg

SEQ ID NO: 643 - RNA, 12 nt, Artificial Sequence
  Description of Artificial Sequence: Synthetic oligonucleotide
gaggaagaggug

SEQ ID NO: 644 - RNA, 13 nt, Artificial Sequence
  Description of Artificial Sequence: Synthetic oligonucleotide
cuacuuugagggc

SEQ ID NO: 645 - RNA, 12 nt, Artificial Sequence
  Description of Artificial Sequence: Synthetic oligonucleotide
agggcaucuccu

SEQ ID NO: 646 - RNA, 10 nt, Artificial Sequence
  Description of Artificial Sequence: Synthetic oligonucleotide
ggagugauau

SEQ ID NO: 647 - RNA, 11 nt, Artificial Sequence
  Description of Artificial Sequence: Synthetic oligonucleotide
gagugauaugg

SEQ ID NO: 648 - RNA, 12 nt, Artificial Sequence
  Description of Artificial Sequence: Synthetic oligonucleotide
ugcaguaaagau

SEQ ID NO: 649 - RNA, 13 nt, Artificial Sequence
  Description of Artificial Sequence: Synthetic oligonucleotide
aguaaagauccua

SEQ ID NO: 650 - RNA, 12 nt, Artificial Sequence
  Description of Artificial Sequence: Synthetic oligonucleotide
ugacaaaggaca

SEQ ID NO: 651 - RNA, 13 nt, Artificial Sequence
  Description of Artificial Sequence: Synthetic oligonucleotide
gcaauugugaccc

SEQ ID NO: 652 - RNA, 12 nt, Artificial Sequence
  Description of Artificial Sequence: Synthetic oligonucleotide
aacaucauccau

SEQ ID NO: 653 - RNA, 12 nt, Artificial Sequence
  Description of Artificial Sequence: Synthetic oligonucleotide
ugaaauccaaca

SEQ ID NO: 654 - RNA, 15 nt, Artificial Sequence
  Description of Artificial Sequence: Synthetic oligonucleotide
aacaauauauuucuc

SEQ ID NO: 655 - RNA, 14 nt, Artificial Sequence
  Description of Artificial Sequence: Synthetic oligonucleotide
aacaguaaagucac

SEQ ID NO: 656 - RNA, 14 nt, Artificial Sequence
  Description of Artificial Sequence: Synthetic oligonucleotide
ugugaagaaaguaa

SEQ ID NO: 657 - RNA, 13 nt, Artificial Sequence
  Description of Artificial Sequence: Synthetic oligonucleotide
cuuccgagccauc

SEQ ID NO: 658 - RNA, 12 nt, Artificial Sequence
  Description of Artificial Sequence: Synthetic oligonucleotide
aauggagguuga

SEQ ID NO: 659 - RNA, 12 nt, Artificial Sequence
  Description of Artificial Sequence: Synthetic oligonucleotide
ggagguugaaua

SEQ ID NO: 660 - RNA, 13 nt, Artificial Sequence
  Description of Artificial Sequence: Synthetic oligonucleotide
auuuugaguuuuc

SEQ ID NO: 661 - RNA, 12 nt, Artificial Sequence
  Description of Artificial Sequence: Synthetic oligonucleotide
uauccuguuugu

SEQ ID NO: 662 - RNA, 11 nt, Artificial Sequence
  Description of Artificial Sequence: Synthetic oligonucleotide
ccuguuuguuc

SEQ ID NO: 663 - RNA, 10 nt, Artificial Sequence
  Description of Artificial Sequence: Synthetic oligonucleotide
cucuacagcc

SEQ ID NO: 664 - RNA, 12 nt, Artificial Sequence
  Description of Artificial Sequence: Synthetic oligonucleotide
ucuuccauagcu

SEQ ID NO: 665 - RNA, 12 nt, Artificial Sequence
  Description of Artificial Sequence: Synthetic oligonucleotide
auaaucuuccug

SEQ ID NO: 666 - RNA, 12 nt, Artificial Sequence
  Description of Artificial Sequence: Synthetic oligonucleotide
uaaucuuccugu

SEQ ID NO: 667 - RNA, 12 nt, Artificial Sequence
  Description of Artificial Sequence: Synthetic oligonucleotide
cuucaugacuug

SEQ ID NO: 668 - RNA, 12 nt, Artificial Sequence
  Description of Artificial Sequence: Synthetic oligonucleotide
aagagggagaga

SEQ ID NO: 669 - RNA, 12 nt, Artificial Sequence
  Description of Artificial Sequence: Synthetic oligonucleotide
cgucuccuacca

SEQ ID NO: 670 - RNA, 12 nt, Artificial Sequence
  Description of Artificial Sequence: Synthetic oligonucleotide
gaucaaucggcc

SEQ ID NO: 671 - RNA, 12 nt, Artificial Sequence
  Description of Artificial Sequence: Synthetic oligonucleotide
ggacgaacaucc

SEQ ID NO: 672 - RNA, 11 nt, Artificial Sequence
  Description of Artificial Sequence: Synthetic oligonucleotide
agggucggaac

SEQ ID NO: 673 - RNA, 10 nt, Artificial Sequence
  Description of Artificial Sequence: Synthetic oligonucleotide
ucggaaccca

SEQ ID NO: 674 - RNA, 11 nt, Artificial Sequence
  Description of Artificial Sequence: Synthetic oligonucleotide
acccaagcuua

SEQ ID NO: 675 - RNA, 14 nt, Artificial Sequence
  Description of Artificial Sequence: Synthetic oligonucleotide
gaacuuuaagcaac

SEQ ID NO: 676 - RNA, 11 nt, Artificial Sequence
  Description of Artificial Sequence: Synthetic oligonucleotide
acuauucagug

SEQ ID NO: 677 - RNA, 11 nt, Artificial Sequence
  Description of Artificial Sequence: Synthetic oligonucleotide
cuauucagugg

SEQ ID NO: 678 - RNA, 13 nt, Artificial Sequence
  Description of Artificial Sequence: Synthetic oligonucleotide
aaacacagauaac

SEQ ID NO: 679 - RNA, 12 nt, Artificial Sequence
  Description of Artificial Sequence: Synthetic oligonucleotide
cuuaagaaaaga

SEQ ID NO: 680 - RNA, 12 nt, Artificial Sequence
  Description of Artificial Sequence: Synthetic oligonucleotide
cugaaggagugu

SEQ ID NO: 681 - RNA, 10 nt, Artificial Sequence
  Description of Artificial Sequence: Synthetic oligonucleotide
ucaccgcggg

SEQ ID NO: 682 - RNA, 14 nt, Artificial Sequence
  Description of Artificial Sequence: Synthetic oligonucleotide
agcagaaauaagcg

SEQ ID NO: 683 - RNA, 12 nt, Artificial Sequence
  Description of Artificial Sequence: Synthetic oligonucleotide
aagcgugccguu

SEQ ID NO: 684 - RNA, 12 nt, Artificial Sequence
  Description of Artificial Sequence: Synthetic oligonucleotide
agaaacagucac

SEQ ID NO: 685 - RNA, 12 nt, Artificial Sequence
  Description of Artificial Sequence: Synthetic oligonucleotide
agaggaagaagg

SEQ ID NO: 686 - RNA, 14 nt, Artificial Sequence
  Description of Artificial Sequence: Synthetic oligonucleotide
uguauucaaaauau

SEQ ID NO: 687 - RNA, 13 nt, Artificial Sequence
  Description of Artificial Sequence: Synthetic oligonucleotide
auuuuccucccuu

SEQ ID NO: 688 - RNA, 13 nt, Artificial Sequence
  Description of Artificial Sequence: Synthetic oligonucleotide
caaagaaagauag

SEQ ID NO: 689 - RNA, 12 nt, Artificial Sequence
  Description of Artificial Sequence: Synthetic oligonucleotide
aagaaagauaga

SEQ ID NO: 690 - RNA, 13 nt, Artificial Sequence
  Description of Artificial Sequence: Synthetic oligonucleotide
gaaagcauuuguu

SEQ ID NO: 691 - RNA, 13 nt, Artificial Sequence
  Description of Artificial Sequence: Synthetic oligonucleotide
ugaguuaaacgaa

SEQ ID NO: 692 - RNA, 12 nt, Artificial Sequence
  Description of Artificial Sequence: Synthetic oligonucleotide
acugauacagaa

SEQ ID NO: 693 - RNA, 12 nt, Artificial Sequence
  Description of Artificial Sequence: Synthetic oligonucleotide
auauuauauaua

SEQ ID NO: 694 - RNA, 12 nt, Artificial Sequence
  Description of Artificial Sequence: Synthetic oligonucleotide
auuauauauaua

SEQ ID NO: 695 - RNA, 12 nt, Artificial Sequence
  Description of Artificial Sequence: Synthetic oligonucleotide
ucacuggaugua

SEQ ID NO: 696 - RNA, 12 nt, Artificial Sequence
  Description of Artificial Sequence: Synthetic oligonucleotide
cagggaagagga

SEQ ID NO: 697 - RNA, 15 nt, Artificial Sequence
  Description of Artificial Sequence: Synthetic oligonucleotide
augaucuuuuuuuug

SEQ ID NO: 698 - RNA, 11 nt, Artificial Sequence
  Description of Artificial Sequence: Synthetic oligonucleotide
aguucacggcc

SEQ ID NO: 699 - RNA, 13 nt, Artificial Sequence
  Description of Artificial Sequence: Synthetic oligonucleotide
caccaucacacca

SEQ ID NO: 700 - RNA, 11 nt, Artificial Sequence
  Description of Artificial Sequence: Synthetic oligonucleotide
ccugcggguuu

SEQ ID NO: 701 - RNA, 10 nt, Artificial Sequence
  Description of Artificial Sequence: Synthetic oligonucleotide
auccaguuug

SEQ ID NO: 702 - RNA, 13 nt, Artificial Sequence
  Description of Artificial Sequence: Synthetic oligonucleotide
guuaaggacuucu

SEQ ID NO: 703 - RNA, 13 nt, Artificial Sequence
  Description of Artificial Sequence: Synthetic oligonucleotide
cagugggacagag

SEQ ID NO: 704 - RNA, 14 nt, Artificial Sequence
  Description of Artificial Sequence: Synthetic oligonucleotide
aauuuguuauugug

SEQ ID NO: 705 - RNA, 13 nt, Artificial Sequence
  Description of Artificial Sequence: Synthetic oligonucleotide
uucaaaugcauuu

SEQ ID NO: 706 - RNA, 10 nt, Artificial Sequence
  Description of Artificial Sequence: Synthetic oligonucleotide
caggaaagcc

SEQ ID NO: 707 - RNA, 11 nt, Artificial Sequence
  Description of Artificial Sequence: Synthetic oligonucleotide
aggaaagcccu

SEQ ID NO: 708 - RNA, 12 nt, Artificial Sequence
  Description of Artificial Sequence: Synthetic oligonucleotide
cccagcauggcc

SEQ ID NO: 709 - RNA, 11 nt, Artificial Sequence
  Description of Artificial Sequence: Synthetic oligonucleotide
cuucucccuga

SEQ ID NO: 710 - RNA, 12 nt, Artificial Sequence
  Description of Artificial Sequence: Synthetic oligonucleotide
gaagaagcccuu

SEQ ID NO: 711 - RNA, 12 nt, Artificial Sequence
  Description of Artificial Sequence: Synthetic oligonucleotide
agaagcccuuca

SEQ ID NO: 712 - RNA, 11 nt, Artificial Sequence
  Description of Artificial Sequence: Synthetic oligonucleotide
gcccuucagcg

SEQ ID NO: 713 - RNA, 11 nt, Artificial Sequence
  Description of Artificial Sequence: Synthetic oligonucleotide
ccuucagcggc

SEQ ID NO: 714 - RNA, 12 nt, Artificial Sequence
  Description of Artificial Sequence: Synthetic oligonucleotide
ucagcggccagu

SEQ ID NO: 715 - RNA, 12 nt, Artificial Sequence
  Description of Artificial Sequence: Synthetic oligonucleotide
ugaaaagcuccg

SEQ ID NO: 716 - RNA, 11 nt, Artificial Sequence
  Description of Artificial Sequence: Synthetic oligonucleotide
aaaagcuccgg

SEQ ID NO: 717 - RNA, 13 nt, Artificial Sequence
  Description of Artificial Sequence: Synthetic oligonucleotide
agucaacagucug

SEQ ID NO: 718 - RNA, 13 nt, Artificial Sequence
  Description of Artificial Sequence: Synthetic oligonucleotide
cagaguucaaaag

SEQ ID NO: 719 - RNA, 13 nt, Artificial Sequence
  Description of Artificial Sequence: Synthetic oligonucleotide
agaguucaaaagc

SEQ ID NO: 720 - RNA, 12 nt, Artificial Sequence
  Description of Artificial Sequence: Synthetic oligonucleotide
uucaaaagcccu

SEQ ID NO: 721 - RNA, 12 nt, Artificial Sequence
  Description of Artificial Sequence: Synthetic oligonucleotide
ucaaaagcccuu

SEQ ID NO: 722 - RNA, 12 nt, Artificial Sequence
  Description of Artificial Sequence: Synthetic oligonucleotide
aaaagcccuuca

SEQ ID NO: 723 - RNA, 12 nt, Artificial Sequence
  Description of Artificial Sequence: Synthetic oligonucleotide
aaagcccuucag

SEQ ID NO: 724 - RNA, 13 nt, Artificial Sequence
  Description of Artificial Sequence: Synthetic oligonucleotide
gugaagccgcucg

SEQ ID NO: 725 - RNA, 12 nt, Artificial Sequence
  Description of Artificial Sequence: Synthetic oligonucleotide
cacgccagucaa

SEQ ID NO: 726 - RNA, 13 nt, Artificial Sequence
  Description of Artificial Sequence: Synthetic oligonucleotide
uucuuggugcgug

SEQ ID NO: 727 - RNA, 14 nt, Artificial Sequence
  Description of Artificial Sequence: Synthetic oligonucleotide
auuggauucaucag

SEQ ID NO: 728 - RNA, 13 nt, Artificial Sequence
  Description of Artificial Sequence: Synthetic oligonucleotide
uggaauaccuaag

SEQ ID NO: 729 - RNA, 12 nt, Artificial Sequence
  Description of Artificial Sequence: Synthetic oligonucleotide
auuugaggcuca

SEQ ID NO: 730 - RNA, 11 nt, Artificial Sequence
  Description of Artificial Sequence: Synthetic oligonucleotide
ucuacaauugg

SEQ ID NO: 731 - RNA, 12 nt, Artificial Sequence
  Description of Artificial Sequence: Synthetic oligonucleotide
uaguuaggagcc

SEQ ID NO: 732 - RNA, 13 nt, Artificial Sequence
  Description of Artificial Sequence: Synthetic oligonucleotide
agucaauauccac

SEQ ID NO: 733 - RNA, 13 nt, Artificial Sequence
  Description of Artificial Sequence: Synthetic oligonucleotide
auguucagucaca

SEQ ID NO: 734 - RNA, 12 nt, Artificial Sequence
  Description of Artificial Sequence: Synthetic oligonucleotide
acacacacauac

SEQ ID NO: 735 - RNA, 12 nt, Artificial Sequence
  Description of Artificial Sequence: Synthetic oligonucleotide
uuccuuuugcuu

SEQ ID NO: 736 - RNA, 16 nt, Artificial Sequence
  Description of Artificial Sequence: Synthetic oligonucleotide
uuuuaaaguaauuuuu

SEQ ID NO: 737 - RNA, 13 nt, Artificial Sequence
  Description of Artificial Sequence: Synthetic oligonucleotide
caacagucaaugg

SEQ ID NO: 738 - RNA, 13 nt, Artificial Sequence
  Description of Artificial Sequence: Synthetic oligonucleotide
ucgacaaaccaau

SEQ ID NO: 739 - RNA, 12 nt, Artificial Sequence
  Description of Artificial Sequence: Synthetic oligonucleotide
acugcuaccacu

SEQ ID NO: 740 - RNA, 13 nt, Artificial Sequence
  Description of Artificial Sequence: Synthetic oligonucleotide
gcaagcggucuua

SEQ ID NO: 741 - RNA, 13 nt, Artificial Sequence
  Description of Artificial Sequence: Synthetic oligonucleotide
ggucuuaccggcu

SEQ ID NO: 742 - RNA, 11 nt, Artificial Sequence
  Description of Artificial Sequence: Synthetic oligonucleotide
gauggguuacc

SEQ ID NO: 743 - RNA, 11 nt, Artificial Sequence
  Description of Artificial Sequence: Synthetic oligonucleotide
guuaccugcga

SEQ ID NO: 744 - RNA, 12 nt, Artificial Sequence
  Description of Artificial Sequence: Synthetic oligonucleotide
aaucuugcugag

SEQ ID NO: 745 - RNA, 13 nt, Artificial Sequence
  Description of Artificial Sequence: Synthetic oligonucleotide
agcauaaaacagu

SEQ ID NO: 746 - RNA, 12 nt, Artificial Sequence
  Description of Artificial Sequence: Synthetic oligonucleotide
guccuuuauccu

SEQ ID NO: 747 - RNA, 12 nt, Artificial Sequence
  Description of Artificial Sequence: Synthetic oligonucleotide
caacgcaaguug

SEQ ID NO: 748 - RNA, 13 nt, Artificial Sequence
  Description of Artificial Sequence: Synthetic oligonucleotide
aaacugaaaccau

SEQ ID NO: 749 - RNA, 14 nt, Artificial Sequence
  Description of Artificial Sequence: Synthetic oligonucleotide
acuuuguuaaauau

SEQ ID NO: 750 - RNA, 14 nt, Artificial Sequence
  Description of Artificial Sequence: Synthetic oligonucleotide
guauauuaaaaguu

SEQ ID NO: 751 - RNA, 13 nt, Artificial Sequence
  Description of Artificial Sequence: Synthetic oligonucleotide
guuuugacuuaac

SEQ ID NO: 752 - RNA, 13 nt, Artificial Sequence
  Description of Artificial Sequence: Synthetic oligonucleotide
gcaaacucagcac

SEQ ID NO: 753 - RNA, 11 nt, Artificial Sequence
  Description of Artificial Sequence: Synthetic oligonucleotide
ugcugaccuca

SEQ ID NO: 754 - RNA, 14 nt, Artificial Sequence
  Description of Artificial Sequence: Synthetic oligonucleotide
uuuauucagaucgc

SEQ ID NO: 755 - RNA, 13 nt, Artificial Sequence
  Description of Artificial Sequence: Synthetic oligonucleotide
aggguucugggau

SEQ ID NO: 756 - RNA, 15 nt, Artificial Sequence
  Description of Artificial Sequence: Synthetic oligonucleotide
auauuggaaauuaug

SEQ ID NO: 757 - RNA, 13 nt, Artificial Sequence
  Description of Artificial Sequence: Synthetic oligonucleotide
auggaagcacuag

SEQ ID NO: 758 - RNA, 13 nt, Artificial Sequence
  Description of Artificial Sequence: Synthetic oligonucleotide
guuuuuaugugga

SEQ ID NO: 759 - RNA, 12 nt, Artificial Sequence
  Description of Artificial Sequence: Synthetic oligonucleotide
ggaauugguaga

SEQ ID NO: 760 - RNA, 13 nt, Artificial Sequence
  Description of Artificial Sequence: Synthetic oligonucleotide
uuagacuuggaga

SEQ ID NO: 761 - RNA, 13 nt, Artificial Sequence
  Description of Artificial Sequence: Synthetic oligonucleotide
uuacaguauucca

SEQ ID NO: 762 - RNA, 15 nt, Artificial Sequence
  Description of Artificial Sequence: Synthetic oligonucleotide
ccacugaugaauuaa

SEQ ID NO: 763 - RNA, 12 nt, Artificial Sequence
  Description of Artificial Sequence: Synthetic oligonucleotide
ccacaucaucac

SEQ ID NO: 764 - RNA, 13 nt, Artificial Sequence
  Description of Artificial Sequence: Synthetic oligonucleotide
cucaccaaacaga

SEQ ID NO: 765 - RNA, 12 nt, Artificial Sequence
  Description of Artificial Sequence: Synthetic oligonucleotide
ggaacaugaugg

SEQ ID NO: 766 - RNA, 12 nt, Artificial Sequence
  Description of Artificial Sequence: Synthetic oligonucleotide
cauguagacugc

SEQ ID NO: 767 - RNA, 13 nt, Artificial Sequence
  Description of Artificial Sequence: Synthetic oligonucleotide
ggaucuauuuaug

SEQ ID NO: 768 - RNA, 12 nt, Artificial Sequence
  Description of Artificial Sequence: Synthetic oligonucleotide
gcacuauuauca

SEQ ID NO: 769 - RNA, 11 nt, Artificial Sequence
  Description of Artificial Sequence: Synthetic oligonucleotide
aucaguucugc

SEQ ID NO: 770 - RNA, 13 nt, Artificial Sequence
  Description of Artificial Sequence: Synthetic oligonucleotide
agauuaaaccuac

SEQ ID NO: 771 - RNA, 13 nt, Artificial Sequence
  Description of Artificial Sequence: Synthetic oligonucleotide
auaaaauccuucu

SEQ ID NO: 772 - RNA, 12 nt, Artificial Sequence
  Description of Artificial Sequence: Synthetic oligonucleotide
aaugcuguagac

SEQ ID NO: 773 - RNA, 13 nt, Artificial Sequence
  Description of Artificial Sequence: Synthetic oligonucleotide
uugauaggaauag

SEQ ID NO: 774 - RNA, 11 nt, Artificial Sequence
  Description of Artificial Sequence: Synthetic oligonucleotide
aauggcccuga

SEQ ID NO: 775 - RNA, 11 nt, Artificial Sequence
  Description of Artificial Sequence: Synthetic oligonucleotide
uuccucaagca

SEQ ID NO: 776 - RNA, 10 nt, Artificial Sequence
  Description of Artificial Sequence: Synthetic oligonucleotide
guucagccca

SEQ ID NO: 777 - RNA, 11 nt, Artificial Sequence
  Description of Artificial Sequence: Synthetic oligonucleotide
gcugcugaacc

SEQ ID NO: 778 - RNA, 12 nt, Artificial Sequence
  Description of Artificial Sequence: Synthetic oligonucleotide
aaguucucuuca

SEQ ID NO: 779 - RNA, 11 nt, Artificial Sequence
  Description of Artificial Sequence: Synthetic oligonucleotide
ccagccuagag

SEQ ID NO: 780 - RNA, 13 nt, Artificial Sequence
  Description of Artificial Sequence: Synthetic oligonucleotide
cucugugaagugu

SEQ ID NO: 781 - RNA, 14 nt, Artificial Sequence
  Description of Artificial Sequence: Synthetic oligonucleotide
ugagaaaauuucaa

SEQ ID NO: 782 - RNA, 11 nt, Artificial Sequence
  Description of Artificial Sequence: Synthetic oligonucleotide
aauccuccuga

SEQ ID NO: 783 - RNA, 12 nt, Artificial Sequence
  Description of Artificial Sequence: Synthetic oligonucleotide
gugacaucauau

SEQ ID NO: 784 - RNA, 13 nt, Artificial Sequence
  Description of Artificial Sequence: Synthetic oligonucleotide
aaucuucaucaua

SEQ ID NO: 785 - RNA, 13 nt, Artificial Sequence
  Description of Artificial Sequence: Synthetic oligonucleotide
gacuagcuauuaa

SEQ ID NO: 786 - RNA, 14 nt, Artificial Sequence
  Description of Artificial Sequence: Synthetic oligonucleotide
ucucuacuaaaaau

SEQ ID NO: 787 - RNA, 12 nt, Artificial Sequence
  Description of Artificial Sequence: Synthetic oligonucleotide
ucuaucucgccu

SEQ ID NO: 788 - RNA, 13 nt, Artificial Sequence
  Description of Artificial Sequence: Synthetic oligonucleotide
cuucgguccaguu

SEQ ID NO: 789 - RNA, 11 nt, Artificial Sequence
  Description of Artificial Sequence: Synthetic oligonucleotide
gauguagccgc

SEQ ID NO: 790 - RNA, 12 nt, Artificial Sequence
  Description of Artificial Sequence: Synthetic oligonucleotide
ugaggagacuug

SEQ ID NO: 791 - RNA, 12 nt, Artificial Sequence
  Description of Artificial Sequence: Synthetic oligonucleotide
gaguagugagga

SEQ ID NO: 792 - RNA, 14 nt, Artificial Sequence
  Description of Artificial Sequence: Synthetic oligonucleotide
cagaugaguacaaa

SEQ ID NO: 793 - RNA, 13 nt, Artificial Sequence
  Description of Artificial Sequence: Synthetic oligonucleotide
guuguuaaugggc

SEQ ID NO: 794 - RNA, 13 nt, Artificial Sequence
  Description of Artificial Sequence: Synthetic oligonucleotide
uuuuuaauuuauu

SEQ ID NO: 795 - RNA, 12 nt, Artificial Sequence
  Description of Artificial Sequence: Synthetic oligonucleotide
uauuuaaauaug

SEQ ID NO: 796 - RNA, 13 nt, Artificial Sequence
  Description of Artificial Sequence: Synthetic oligonucleotide
uauccuuuguuuc

SEQ ID NO: 797 - RNA, 14 nt, Artificial Sequence
  Description of Artificial Sequence: Synthetic oligonucleotide
cgucuaaguguuug

SEQ ID NO: 798 - RNA, 12 nt, Artificial Sequence
  Description of Artificial Sequence: Synthetic oligonucleotide
accugugacaaa

SEQ ID NO: 799 - RNA, 13 nt, Artificial Sequence
  Description of Artificial Sequence: Synthetic oligonucleotide
ccaggcugaauua

SEQ ID NO: 800 - RNA, 14 nt, Artificial Sequence
  Description of Artificial Sequence: Synthetic oligonucleotide
gucauucuuacaau

SEQ ID NO: 801 - RNA, 15 nt, Artificial Sequence
  Description of Artificial Sequence: Synthetic oligonucleotide
ucauucuuacaauug

SEQ ID NO: 802 - RNA, 12 nt, Artificial Sequence
  Description of Artificial Sequence: Synthetic oligonucleotide
cagagaguguac

SEQ ID NO: 803 - RNA, 12 nt, Artificial Sequence
  Description of Artificial Sequence: Synthetic oligonucleotide
agaacucagcag

SEQ ID NO: 804 - RNA, 13 nt, Artificial Sequence
  Description of Artificial Sequence: Synthetic oligonucleotide
uuuauuuucagua

SEQ ID NO: 805 - RNA, 12 nt, Artificial Sequence
  Description of Artificial Sequence: Synthetic oligonucleotide
ucuuaaauggaa

SEQ ID NO: 806 - RNA, 13 nt, Artificial Sequence
  Description of Artificial Sequence: Synthetic oligonucleotide
ugccuaaaauugu

SEQ ID NO: 807 - RNA, 12 nt, Artificial Sequence
  Description of Artificial Sequence: Synthetic oligonucleotide
agacugugagcu

SEQ ID NO: 808 - RNA, 14 nt, Artificial Sequence
  Description of Artificial Sequence: Synthetic oligonucleotide
ugcuuuuuauuaau

SEQ ID NO: 809 - RNA, 13 nt, Artificial Sequence
  Description of Artificial Sequence: Synthetic oligonucleotide
cucuucuuacauu

SEQ ID NO: 810 - RNA, 15 nt, Artificial Sequence
  Description of Artificial Sequence: Synthetic oligonucleotide
cauuuguaaaaaugu

SEQ ID NO: 811 - RNA, 15 nt, Artificial Sequence
  Description of Artificial Sequence: Synthetic oligonucleotide
aucuuaauucauauu

SEQ ID NO: 812 - RNA, 13 nt, Artificial Sequence
  Description of Artificial Sequence: Synthetic oligonucleotide
gaacuaaucauga

SEQ ID NO: 813 - RNA, 12 nt, Artificial Sequence
  Description of Artificial Sequence: Synthetic oligonucleotide
ucugcucuuggg

SEQ ID NO: 814 - RNA, 13 nt, Artificial Sequence
  Description of Artificial Sequence: Synthetic oligonucleotide
caguagcuuugag

SEQ ID NO: 815 - RNA, 14 nt, Artificial Sequence
  Description of Artificial Sequence: Synthetic oligonucleotide
cacguaauauuuca

SEQ ID NO: 816 - RNA, 13 nt, Artificial Sequence
  Description of Artificial Sequence: Synthetic oligonucleotide
uauucucuucacu

SEQ ID NO: 817 - RNA, 14 nt, Artificial Sequence
  Description of Artificial Sequence: Synthetic oligonucleotide
cuaaugcuaagaaa

SEQ ID NO: 818 - RNA, 12 nt, Artificial Sequence
  Description of Artificial Sequence: Synthetic oligonucleotide
gcugaaaaucaa

SEQ ID NO: 819 - RNA, 14 nt, Artificial Sequence
  Description of Artificial Sequence: Synthetic oligonucleotide
aauaugauuacuuu

SEQ ID NO: 820 - RNA, 14 nt, Artificial Sequence
  Description of Artificial Sequence: Synthetic oligonucleotide
cauuuuguucuaca

SEQ ID NO: 821 - RNA, 12 nt, Artificial Sequence
  Description of Artificial Sequence: Synthetic oligonucleotide
cccgggacucuc

SEQ ID NO: 822 - RNA, 14 nt, Artificial Sequence
  Description of Artificial Sequence: Synthetic oligonucleotide
ccuuuaaaguaaag

SEQ ID NO: 823 - RNA, 13 nt, Artificial Sequence
  Description of Artificial Sequence: Synthetic oligonucleotide
ucuggaagccugg

SEQ ID NO: 824 - RNA, 14 nt, Artificial Sequence
  Description of Artificial Sequence: Synthetic oligonucleotide
aaaacaaaagagag

SEQ ID NO: 825 - RNA, 13 nt, Artificial Sequence
  Description of Artificial Sequence: Synthetic oligonucleotide
aucaguuaugccg

SEQ ID NO: 826 - RNA, 13 nt, Artificial Sequence
  Description of Artificial Sequence: Synthetic oligonucleotide
uaaaagaagucca

SEQ ID NO: 827 - RNA, 11 nt, Artificial Sequence
  Description of Artificial Sequence: Synthetic oligonucleotide
aggugagguua

SEQ ID NO: 828 - RNA, 11 nt, Artificial Sequence
  Description of Artificial Sequence: Synthetic oligonucleotide
gggaagaggac

SEQ ID NO: 829 - RNA, 13 nt, Artificial Sequence
  Description of Artificial Sequence: Synthetic oligonucleotide
aagcaaguauugu

SEQ ID NO: 830 - RNA, 12 nt, Artificial Sequence
  Description of Artificial Sequence: Synthetic oligonucleotide
auuguagcacuc

SEQ ID NO: 831 - RNA, 14 nt, Artificial Sequence
  Description of Artificial Sequence: Synthetic oligonucleotide
acaaaaccacaaau

SEQ ID NO: 832 - RNA, 12 nt, Artificial Sequence
  Description of Artificial Sequence: Synthetic oligonucleotide
uaagcccauaca

SEQ ID NO: 833 - RNA, 11 nt, Artificial Sequence
  Description of Artificial Sequence: Synthetic oligonucleotide
agcccauacag

SEQ ID NO: 834 - RNA, 12 nt, Artificial Sequence
  Description of Artificial Sequence: Synthetic oligonucleotide
cagaaaccuucc

SEQ ID NO: 835 - RNA, 10 nt, Artificial Sequence
  Description of Artificial Sequence: Synthetic oligonucleotide
guauaccuac

SEQ ID NO: 836 - RNA, 13 nt, Artificial Sequence
  Description of Artificial Sequence: Synthetic oligonucleotide
gccaguuuucgga

SEQ ID NO: 837 - RNA, 9 nt, Artificial Sequence
  Description of Artificial Sequence: Synthetic oligonucleotide
ggaacaggg

SEQ ID NO: 838 - RNA, 13 nt, Artificial Sequence
  Description of Artificial Sequence: Synthetic oligonucleotide
uuaacuuuccagu

SEQ ID NO: 839 - RNA, 14 nt, Artificial Sequence
  Description of Artificial Sequence: Synthetic oligonucleotide
aaaguuugguuuug

SEQ ID NO: 840 - RNA, 12 nt, Artificial Sequence
  Description of Artificial Sequence: Synthetic oligonucleotide
cuucccacugua

SEQ ID NO: 841 - RNA, 13 nt, Artificial Sequence
  Description of Artificial Sequence: Synthetic oligonucleotide
ugauaccauauga

SEQ ID NO: 842 - RNA, 11 nt, Artificial Sequence
  Description of Artificial Sequence: Synthetic oligonucleotide
aacaugggcug

SEQ ID NO: 843 - RNA, 13 nt, Artificial Sequence
  Description of Artificial Sequence: Synthetic oligonucleotide
caacuuuuucaua

SEQ ID NO: 844 - RNA, 12 nt, Artificial Sequence
  Description of Artificial Sequence: Synthetic oligonucleotide
caugaggccgga

SEQ ID NO: 845 - RNA, 11 nt, Artificial Sequence
  Description of Artificial Sequence: Synthetic oligonucleotide
acugcauuugu

SEQ ID NO: 846 - RNA, 13 nt, Artificial Sequence
  Description of Artificial Sequence: Synthetic oligonucleotide
aauguuuacuacc

SEQ ID NO: 847 - RNA, 15 nt, Artificial Sequence
  Description of Artificial Sequence: Synthetic oligonucleotide
aauuuuuugaugaaa

SEQ ID NO: 848 - RNA, 14 nt, Artificial Sequence
  Description of Artificial Sequence: Synthetic oligonucleotide
cagugugugaauuu

SEQ ID NO: 849 - RNA, 13 nt, Artificial Sequence
  Description of Artificial Sequence: Synthetic oligonucleotide
gagcaauguaugu

SEQ ID NO: 850 - RNA, 14 nt, Artificial Sequence
  Description of Artificial Sequence: Synthetic oligonucleotide
aaagcacauauaua

SEQ ID NO: 851 - RNA, 14 nt, Artificial Sequence
  Description of Artificial Sequence: Synthetic oligonucleotide
guaauaguuucucc

SEQ ID NO: 852 - RNA, 13 nt, Artificial Sequence
  Description of Artificial Sequence: Synthetic oligonucleotide
aguuucuccaaau

SEQ ID NO: 853 - RNA, 13 nt, Artificial Sequence
  Description of Artificial Sequence: Synthetic oligonucleotide
uacuuccuagaaa

SEQ ID NO: 854 - RNA, 13 nt, Artificial Sequence
  Description of Artificial Sequence: Synthetic oligonucleotide
uacaccauauaug

SEQ ID NO: 855 - RNA, 14 nt, Artificial Sequence
  Description of Artificial Sequence: Synthetic oligonucleotide
auauaugaauggag

SEQ ID NO: 856 - RNA, 13 nt, Artificial Sequence
  Description of Artificial Sequence: Synthetic oligonucleotide
acgagaagaagau

SEQ ID NO: 857 - RNA, 13 nt, Artificial Sequence
  Description of Artificial Sequence: Synthetic oligonucleotide
ucauuuacaggga

SEQ ID NO: 858 - RNA, 13 nt, Artificial Sequence
  Description of Artificial Sequence: Synthetic oligonucleotide
cauuuacagggac

SEQ ID NO: 859 - RNA, 10 nt, Artificial Sequence
  Description of Artificial Sequence: Synthetic oligonucleotide
agggaccuga

SEQ ID NO: 860 - RNA, 14 nt, Artificial Sequence
  Description of Artificial Sequence: Synthetic oligonucleotide
uguuugacugcauc

SEQ ID NO: 861 - RNA, 13 nt, Artificial Sequence
  Description of Artificial Sequence: Synthetic oligonucleotide
uuugacugcaucg

SEQ ID NO: 862 - RNA, 12 nt, Artificial Sequence
  Description of Artificial Sequence: Synthetic oligonucleotide
gaguucacaggg

SEQ ID NO: 863 - RNA, 13 nt, Artificial Sequence
  Description of Artificial Sequence: Synthetic oligonucleotide
ggcaccucugucc

SEQ ID NO: 864 - RNA, 15 nt, Artificial Sequence
  Description of Artificial Sequence: Synthetic oligonucleotide
gguuugucuuuuuaa

SEQ ID NO: 865 - RNA, 14 nt, Artificial Sequence
  Description of Artificial Sequence: Synthetic oligonucleotide
uuugucuuuuuaag

SEQ ID NO: 866 - RNA, 13 nt, Artificial Sequence
  Description of Artificial Sequence: Synthetic oligonucleotide
ccuaaagguuguc

SEQ ID NO: 867 - RNA, 12 nt, Artificial Sequence
  Description of Artificial Sequence: Synthetic oligonucleotide
aagguugucgac

SEQ ID NO: 868 - RNA, 13 nt, Artificial Sequence
  Description of Artificial Sequence: Synthetic oligonucleotide
accuggcaauugu

SEQ ID NO: 869 - RNA, 12 nt, Artificial Sequence
  Description of Artificial Sequence: Synthetic oligonucleotide
aguggugcgagg

SEQ ID NO: 870 - RNA, 13 nt, Artificial Sequence
  Description of Artificial Sequence: Synthetic oligonucleotide
agagacaugaaau

SEQ ID NO: 871 - RNA, 13 nt, Artificial Sequence
  Description of Artificial Sequence: Synthetic oligonucleotide
auauauuucucca

SEQ ID NO: 872 - RNA, 10 nt, Artificial Sequence
  Description of Artificial Sequence: Synthetic oligonucleotide
caugaaggcu

SEQ ID NO: 873 - RNA, 11 nt, Artificial Sequence
  Description of Artificial Sequence: Synthetic oligonucleotide
gcuggaguggu

SEQ ID NO: 874 - RNA, 11 nt, Artificial Sequence
  Description of Artificial Sequence: Synthetic oligonucleotide
aggaagagagg

SEQ ID NO: 875 - RNA, 12 nt, Artificial Sequence
  Description of Artificial Sequence: Synthetic oligonucleotide
cuugcaucgggc

SEQ ID NO: 876 - RNA, 13 nt, Artificial Sequence
  Description of Artificial Sequence: Synthetic oligonucleotide
auauccuacugug

SEQ ID NO: 877 - RNA, 13 nt, Artificial Sequence
  Description of Artificial Sequence: Synthetic oligonucleotide
uccuacuguguaa

SEQ ID NO: 878 - RNA, 12 nt, Artificial Sequence
  Description of Artificial Sequence: Synthetic oligonucleotide
ccuuguagugua

SEQ ID NO: 879 - RNA, 13 nt, Artificial Sequence
  Description of Artificial Sequence: Synthetic oligonucleotide
ucuuuguugauug

SEQ ID NO: 880 - RNA, 14 nt, Artificial Sequence
  Description of Artificial Sequence: Synthetic oligonucleotide
uuuguugauugaaa

SEQ ID NO: 881 - RNA, 15 nt, Artificial Sequence
  Description of Artificial Sequence: Synthetic oligonucleotide
uucuuuuucuuccau

SEQ ID NO: 882 - RNA, 13 nt, Artificial Sequence
  Description of Artificial Sequence: Synthetic oligonucleotide
aaucuuccuucua

SEQ ID NO: 883 - RNA, 13 nt, Artificial Sequence
  Description of Artificial Sequence: Synthetic oligonucleotide
uugaaugcuucau

SEQ ID NO: 884 - RNA, 13 nt, Artificial Sequence
  Description of Artificial Sequence: Synthetic oligonucleotide
ugaaugcuucaug

SEQ ID NO: 885 - RNA, 13 nt, Artificial Sequence
  Description of Artificial Sequence: Synthetic oligonucleotide
aauucuacuuuga

SEQ ID NO: 886 - RNA, 13 nt, Artificial Sequence
  Description of Artificial Sequence: Synthetic oligonucleotide
agcaacuacagac

SEQ ID NO: 887 - RNA, 13 nt, Artificial Sequence
  Description of Artificial Sequence: Synthetic oligonucleotide
gaccaaggucaac

SEQ ID NO: 888 - RNA, 13 nt, Artificial Sequence
  Description of Artificial Sequence: Synthetic oligonucleotide
cgacuaucucgac

SEQ ID NO: 889 - RNA, 13 nt, Artificial Sequence
  Description of Artificial Sequence: Synthetic oligonucleotide
aaccuucccaaac

SEQ ID NO: 890 - RNA, 14 nt, Artificial Sequence
  Description of Artificial Sequence: Synthetic oligonucleotide
ccaagcuuagaacu

SEQ ID NO: 891 - RNA, 15 nt, Artificial Sequence
  Description of Artificial Sequence: Synthetic oligonucleotide
agcuuagaacuuuaa

SEQ ID NO: 892 - RNA, 11 nt, Artificial Sequence
  Description of Artificial Sequence: Synthetic oligonucleotide
aagaccaccac

SEQ ID NO: 893 - RNA, 14 nt, Artificial Sequence
  Description of Artificial Sequence: Synthetic oligonucleotide
gcgagaaauaaagu

SEQ ID NO: 894 - RNA, 14 nt, Artificial Sequence
  Description of Artificial Sequence: Synthetic oligonucleotide
cgagaaauaaaguu

SEQ ID NO: 895 - RNA, 12 nt, Artificial Sequence
  Description of Artificial Sequence: Synthetic oligonucleotide
aggaaaugaucc

SEQ ID NO: 896 - RNA, 13 nt, Artificial Sequence
  Description of Artificial Sequence: Synthetic oligonucleotide
gaagaaaugaaac

SEQ ID NO: 897 - RNA, 13 nt, Artificial Sequence
  Description of Artificial Sequence: Synthetic oligonucleotide
guuuccauccucc

SEQ ID NO: 898 - RNA, 15 nt, Artificial Sequence
  Description of Artificial Sequence: Synthetic oligonucleotide
acugaaaaucuuuga

SEQ ID NO: 899 - RNA, 11 nt, Artificial Sequence
  Description of Artificial Sequence: Synthetic oligonucleotide
ugccguucagg

SEQ ID NO: 900 - RNA, 13 nt, Artificial Sequence
  Description of Artificial Sequence: Synthetic oligonucleotide
caggguccagaag

SEQ ID NO: 901 - RNA, 13 nt, Artificial Sequence
  Description of Artificial Sequence: Synthetic oligonucleotide
ucaagacugcuug

SEQ ID NO: 902 - RNA, 13 nt, Artificial Sequence
  Description of Artificial Sequence: Synthetic oligonucleotide
uccaugucuuugg

SEQ ID NO: 903 - RNA, 11 nt, Artificial Sequence
  Description of Artificial Sequence: Synthetic oligonucleotide
gccugaaacac

SEQ ID NO: 904 - RNA, 12 nt, Artificial Sequence
  Description of Artificial Sequence: Synthetic oligonucleotide
ucucuguaccuc

SEQ ID NO: 905 - RNA, 12 nt, Artificial Sequence
  Description of Artificial Sequence: Synthetic oligonucleotide
agcaagacaaga

SEQ ID NO: 906 - RNA, 13 nt, Artificial Sequence
  Description of Artificial Sequence: Synthetic oligonucleotide
gcaagacaagaaa

SEQ ID NO: 907 - RNA, 12 nt, Artificial Sequence
  Description of Artificial Sequence: Synthetic oligonucleotide
uguacaagaucc

SEQ ID NO: 908 - RNA, 12 nt, Artificial Sequence
  Description of Artificial Sequence: Synthetic oligonucleotide
cguacuugcaga

SEQ ID NO: 909 - RNA, 13 nt, Artificial Sequence
  Description of Artificial Sequence: Synthetic oligonucleotide
cgaucgauacaga

SEQ ID NO: 910 - RNA, 13 nt, Artificial Sequence
  Description of Artificial Sequence: Synthetic oligonucleotide
uauaaaaauaaau

SEQ ID NO: 911 - RNA, 13 nt, Artificial Sequence
  Description of Artificial Sequence: Synthetic oligonucleotide
uaaaaauaaauau

SEQ ID NO: 912 - RNA, 13 nt, Artificial Sequence
  Description of Artificial Sequence: Synthetic oligonucleotide
uuugacugcugug

SEQ ID NO: 913 - RNA, 13 nt, Artificial Sequence
  Description of Artificial Sequence: Synthetic oligonucleotide
ggagaugagagac

SEQ ID NO: 914 - RNA, 10 nt, Artificial Sequence
  Description of Artificial Sequence: Synthetic oligonucleotide
ucccacuugg

SEQ ID NO: 915 - RNA, 10 nt, Artificial Sequence
  Description of Artificial Sequence: Synthetic oligonucleotide
guucacggcc

SEQ ID NO: 916 - RNA, 12 nt, Artificial Sequence
  Description of Artificial Sequence: Synthetic oligonucleotide
accaucacacca

SEQ ID NO: 917 - RNA, 10 nt, Artificial Sequence
  Description of Artificial Sequence: Synthetic oligonucleotide
cugcggguuu

SEQ ID NO: 918 - RNA, 9 nt, Artificial Sequence
  Description of Artificial Sequence: Synthetic oligonucleotide
uccaguuug

SEQ ID NO: 919 - RNA, 12 nt, Artificial Sequence
  Description of Artificial Sequence: Synthetic oligonucleotide
uuaaggacuucu

SEQ ID NO: 920 - RNA, 12 nt, Artificial Sequence
  Description of Artificial Sequence: Synthetic oligonucleotide
agugggacagag

SEQ ID NO: 921 - RNA, 13 nt, Artificial Sequence
  Description of Artificial Sequence: Synthetic oligonucleotide
auuuguuauugug

SEQ ID NO: 922 - RNA, 12 nt, Artificial Sequence
  Description of Artificial Sequence: Synthetic oligonucleotide
ucaaaugcauuu

SEQ ID NO: 923 - RNA, 9 nt, Artificial Sequence
  Description of Artificial Sequence: Synthetic oligonucleotide
aggaaagcc

SEQ ID NO: 924 - RNA, 10 nt, Artificial Sequence
  Description of Artificial Sequence: Synthetic oligonucleotide
ggaaagcccu

SEQ ID NO: 925 - RNA, 11 nt, Artificial Sequence
  Description of Artificial Sequence: Synthetic oligonucleotide
ccagcauggcc

SEQ ID NO: 926 - RNA, 10 nt, Artificial Sequence
  Description of Artificial Sequence: Synthetic oligonucleotide
uucucccuga

SEQ ID NO: 927 - RNA, 11 nt, Artificial Sequence
  Description of Artificial Sequence: Synthetic oligonucleotide
aagaagcccuu

SEQ ID NO: 928 - RNA, 11 nt, Artificial Sequence
  Description of Artificial Sequence: Synthetic oligonucleotide
gaagcccuuca

SEQ ID NO: 929 - RNA, 10 nt, Artificial Sequence
  Description of Artificial Sequence: Synthetic oligonucleotide
cccuucagcg

SEQ ID NO: 930 - RNA, 10 nt, Artificial Sequence
  Description of Artificial Sequence: Synthetic oligonucleotide
cuucagcggc

SEQ ID NO: 931 - RNA, 11 nt, Artificial Sequence
  Description of Artificial Sequence: Synthetic oligonucleotide
cagcggccagu

SEQ ID NO: 932 - RNA, 11 nt, Artificial Sequence
  Description of Artificial Sequence: Synthetic oligonucleotide
gaaaagcuccg

SEQ ID NO: 933 - RNA, 10 nt, Artificial Sequence
  Description of Artificial Sequence: Synthetic oligonucleotide
aaagcuccgg

SEQ ID NO: 934 - RNA, 12 nt, Artificial Sequence
  Description of Artificial Sequence: Synthetic oligonucleotide
gucaacagucug

SEQ ID NO: 935 - RNA, 12 nt, Artificial Sequence
  Description of Artificial Sequence: Synthetic oligonucleotide
agaguucaaaag

SEQ ID NO: 936 - RNA, 12 nt, Artificial Sequence
  Description of Artificial Sequence: Synthetic oligonucleotide
gaguucaaaagc

SEQ ID NO: 937 - RNA, 11 nt, Artificial Sequence
  Description of Artificial Sequence: Synthetic oligonucleotide
ucaaaagcccu

SEQ ID NO: 938 - RNA, 11 nt, Artificial Sequence
  Description of Artificial Sequence: Synthetic oligonucleotide
caaaagcccuu

SEQ ID NO: 939 - RNA, 11 nt, Artificial Sequence
  Description of Artificial Sequence: Synthetic oligonucleotide
aaagcccuuca

SEQ ID NO: 940 - RNA, 11 nt, Artificial Sequence
  Description of Artificial Sequence: Synthetic oligonucleotide
aagcccuucag

SEQ ID NO: 941 - RNA, 12 nt, Artificial Sequence
  Description of Artificial Sequence: Synthetic oligonucleotide
ugaagccgcucg

SEQ ID NO: 942 - RNA, 11 nt, Artificial Sequence
  Description of Artificial Sequence: Synthetic oligonucleotide
acgccagucaa

SEQ ID NO: 943 - RNA, 12 nt, Artificial Sequence
  Description of Artificial Sequence: Synthetic oligonucleotide
ucuuggugcgug

SEQ ID NO: 944 - RNA, 13 nt, Artificial Sequence
  Description of Artificial Sequence: Synthetic oligonucleotide
uuggauucaucag

SEQ ID NO: 945 - RNA, 12 nt, Artificial Sequence
  Description of Artificial Sequence: Synthetic oligonucleotide
ggaauaccuaag

SEQ ID NO: 946 - RNA, 11 nt, Artificial Sequence
  Description of Artificial Sequence: Synthetic oligonucleotide
uuugaggcuca

SEQ ID NO: 947 - RNA, 10 nt, Artificial Sequence
  Description of Artificial Sequence: Synthetic oligonucleotide
cuacaauugg

SEQ ID NO: 948 - RNA, 11 nt, Artificial Sequence
  Description of Artificial Sequence: Synthetic oligonucleotide
aguuaggagcc

SEQ ID NO: 949 - RNA, 12 nt, Artificial Sequence
  Description of Artificial Sequence: Synthetic oligonucleotide
gucaauauccac

SEQ ID NO: 950 - RNA, 12 nt, Artificial Sequence
  Description of Artificial Sequence: Synthetic oligonucleotide
uguucagucaca

SEQ ID NO: 951 - RNA, 11 nt, Artificial Sequence
  Description of Artificial Sequence: Synthetic oligonucleotide
cacacacauac

SEQ ID NO: 952 - RNA, 11 nt, Artificial Sequence
  Description of Artificial Sequence: Synthetic oligonucleotide
uccuuuugcuu

SEQ ID NO: 953 - RNA, 15 nt, Artificial Sequence
  Description of Artificial Sequence: Synthetic oligonucleotide
uuuaaaguaauuuuu

SEQ ID NO: 954 - RNA, 12 nt, Artificial Sequence
  Description of Artificial Sequence: Synthetic oligonucleotide
aacagucaaugg

SEQ ID NO: 955 - RNA, 12 nt, Artificial Sequence
  Description of Artificial Sequence: Synthetic oligonucleotide
cgacaaaccaau

SEQ ID NO: 956 - RNA, 11 nt, Artificial Sequence
  Description of Artificial Sequence: Synthetic oligonucleotide
cugcuaccacu

SEQ ID NO: 957 - RNA, 12 nt, Artificial Sequence
  Description of Artificial Sequence: Synthetic oligonucleotide
caagcggucuua

SEQ ID NO: 958 - RNA, 12 nt, Artificial Sequence
  Description of Artificial Sequence: Synthetic oligonucleotide
gucuuaccggcu

SEQ ID NO: 959 - RNA, 10 nt, Artificial Sequence
  Description of Artificial Sequence: Synthetic oligonucleotide
auggguuacc

SEQ ID NO: 960 - RNA, 10 nt, Artificial Sequence
  Description of Artificial Sequence: Synthetic oligonucleotide
uuaccugcga

SEQ ID NO: 961 - RNA, 11 nt, Artificial Sequence
  Description of Artificial Sequence: Synthetic oligonucleotide
aucuugcugag

SEQ ID NO: 962 - RNA, 12 nt, Artificial Sequence
  Description of Artificial Sequence: Synthetic oligonucleotide
gcauaaaacagu

SEQ ID NO: 963 - RNA, 11 nt, Artificial Sequence
  Description of Artificial Sequence: Synthetic oligonucleotide
uccuuuauccu

SEQ ID NO: 964 - RNA, 11 nt, Artificial Sequence
  Description of Artificial Sequence: Synthetic oligonucleotide
aacgcaaguug

SEQ ID NO: 965 - RNA, 12 nt, Artificial Sequence
  Description of Artificial Sequence: Synthetic oligonucleotide
aacugaaaccau

SEQ ID NO: 966 - RNA, 13 nt, Artificial Sequence
  Description of Artificial Sequence: Synthetic oligonucleotide
cuuuguuaaauau

SEQ ID NO: 967 - RNA, 13 nt, Artificial Sequence
  Description of Artificial Sequence: Synthetic oligonucleotide
uauauuaaaaguu

SEQ ID NO: 968 - RNA, 12 nt, Artificial Sequence
  Description of Artificial Sequence: Synthetic oligonucleotide
uuuugacuuaac

SEQ ID NO: 969 - RNA, 12 nt, Artificial Sequence
  Description of Artificial Sequence: Synthetic oligonucleotide
caaacucagcac

SEQ ID NO: 970 - RNA, 10 nt, Artificial Sequence
  Description of Artificial Sequence: Synthetic oligonucleotide
gcugaccuca

SEQ ID NO: 971 - RNA, 13 nt, Artificial Sequence
  Description of Artificial Sequence: Synthetic oligonucleotide
uuauucagaucgc

SEQ ID NO: 972 - RNA, 12 nt, Artificial Sequence
  Description of Artificial Sequence: Synthetic oligonucleotide
ggguucugggau

SEQ ID NO: 973 - RNA, 14 nt, Artificial Sequence
  Description of Artificial Sequence: Synthetic oligonucleotide
uauuggaaauuaug

SEQ ID NO: 974 - RNA, 12 nt, Artificial Sequence
  Description of Artificial Sequence: Synthetic oligonucleotide
uggaagcacuag

SEQ ID NO: 975 - RNA, 12 nt, Artificial Sequence
  Description of Artificial Sequence: Synthetic oligonucleotide
uuuuuaugugga

SEQ ID NO: 976 - RNA, 11 nt, Artificial Sequence
  Description of Artificial Sequence: Synthetic oligonucleotide
gaauugguaga

SEQ ID NO: 977 - RNA, 12 nt, Artificial Sequence
  Description of Artificial Sequence: Synthetic oligonucleotide
uagacuuggaga

SEQ ID NO: 978 - RNA, 12 nt, Artificial Sequence
  Description of Artificial Sequence: Synthetic oligonucleotide
uacaguauucca

SEQ ID NO: 979 - RNA, 14 nt, Artificial Sequence
  Description of Artificial Sequence: Synthetic oligonucleotide
cacugaugaauuaa

SEQ ID NO: 980 - RNA, 11 nt, Artificial Sequence
  Description of Artificial Sequence: Synthetic oligonucleotide
cacaucaucac

SEQ ID NO: 981 - RNA, 12 nt, Artificial Sequence
  Description of Artificial Sequence: Synthetic oligonucleotide
ucaccaaacaga

SEQ ID NO: 982 - RNA, 11 nt, Artificial Sequence
  Description of Artificial Sequence: Synthetic oligonucleotide
gaacaugaugg

SEQ ID NO: 983 - RNA, 11 nt, Artificial Sequence
  Description of Artificial Sequence: Synthetic oligonucleotide
auguagacugc

SEQ ID NO: 984 - RNA, 12 nt, Artificial Sequence
  Description of Artificial Sequence: Synthetic oligonucleotide
gaucuauuuaug

SEQ ID NO: 985 - RNA, 11 nt, Artificial Sequence
  Description of Artificial Sequence: Synthetic oligonucleotide
cacuauuauca

SEQ ID NO: 986 - RNA, 10 nt, Artificial Sequence
  Description of Artificial Sequence: Synthetic oligonucleotide
ucaguucugc

SEQ ID NO: 987 - RNA, 12 nt, Artificial Sequence
  Description of Artificial Sequence: Synthetic oligonucleotide
gauuaaaccuac

SEQ ID NO: 988 - RNA, 12 nt, Artificial Sequence
  Description of Artificial Sequence: Synthetic oligonucleotide
uaaaauccuucu

SEQ ID NO: 989 - RNA, 11 nt, Artificial Sequence
  Description of Artificial Sequence: Synthetic oligonucleotide
augcuguagac

SEQ ID NO: 990 - RNA, 12 nt, Artificial Sequence
  Description of Artificial Sequence: Synthetic oligonucleotide
ugauaggaauag

SEQ ID NO: 991 - RNA, 10 nt, Artificial Sequence
  Description of Artificial Sequence: Synthetic oligonucleotide
auggcccuga

SEQ ID NO: 992 - RNA, 10 nt, Artificial Sequence
  Description of Artificial Sequence: Synthetic oligonucleotide
uccucaagca

SEQ ID NO: 993 - RNA, 9 nt, Artificial Sequence
  Description of Artificial Sequence: Synthetic oligonucleotide
uucagccca

SEQ ID NO: 994 - RNA, 10 nt, Artificial Sequence
  Description of Artificial Sequence: Synthetic oligonucleotide
cugcugaacc

SEQ ID NO: 995 - RNA, 11 nt, Artificial Sequence
  Description of Artificial Sequence: Synthetic oligonucleotide
aguucucuuca

SEQ ID NO: 996 - RNA, 10 nt, Artificial Sequence
  Description of Artificial Sequence: Synthetic oligonucleotide
cagccuagag

SEQ ID NO: 997 - RNA, 12 nt, Artificial Sequence
  Description of Artificial Sequence: Synthetic oligonucleotide
ucugugaagugu

SEQ ID NO: 998 - RNA, 13 nt, Artificial Sequence
  Description of Artificial Sequence: Synthetic oligonucleotide
gagaaaauuucaa

SEQ ID NO: 999 - RNA, 10 nt, Artificial Sequence
  Description of Artificial Sequence: Synthetic oligonucleotide
auccuccuga

SEQ ID NO: 1000 - RNA, 11 nt, Artificial Sequence
  Description of Artificial Sequence: Synthetic oligonucleotide
ugacaucauau

SEQ ID NO: 1001 - RNA, 12 nt, Artificial Sequence
  Description of Artificial Sequence: Synthetic oligonucleotide
aucuucaucaua

SEQ ID NO: 1002 - RNA, 12 nt, Artificial Sequence
  Description of Artificial Sequence: Synthetic oligonucleotide
acuagcuauuaa

SEQ ID NO: 1003 - RNA, 13 nt, Artificial Sequence
  Description of Artificial Sequence: Synthetic oligonucleotide
cucuacuaaaaau

SEQ ID NO: 1004 - RNA, 11 nt, Artificial Sequence
  Description of Artificial Sequence: Synthetic oligonucleotide
cuaucucgccu

SEQ ID NO: 1005 - RNA, 12 nt, Artificial Sequence
  Description of Artificial Sequence: Synthetic oligonucleotide
uucgguccaguu

SEQ ID NO: 1006 - RNA, 10 nt, Artificial Sequence
  Description of Artificial Sequence: Synthetic oligonucleotide
auguagccgc

SEQ ID NO: 1007 - RNA, 11 nt, Artificial Sequence
  Description of Artificial Sequence: Synthetic oligonucleotide
gaggagacuug

SEQ ID NO: 1008 - RNA, 11 nt, Artificial Sequence
  Description of Artificial Sequence: Synthetic oligonucleotide
aguagugagga

SEQ ID NO: 1009 - RNA, 13 nt, Artificial Sequence
  Description of Artificial Sequence: Synthetic oligonucleotide
agaugaguacaaa

SEQ ID NO: 1010 - RNA, 12 nt, Artificial Sequence
  Description of Artificial Sequence: Synthetic oligonucleotide
uuguuaaugggc

SEQ ID NO: 1011 - RNA, 12 nt, Artificial Sequence
  Description of Artificial Sequence: Synthetic oligonucleotide
uuuuaauuuauu

SEQ ID NO: 1012 - RNA, 11 nt, Artificial Sequence
  Description of Artificial Sequence: Synthetic oligonucleotide
auuuaaauaug

SEQ ID NO: 1013 - RNA, 12 nt, Artificial Sequence
  Description of Artificial Sequence: Synthetic oligonucleotide
auccuuuguuuc

SEQ ID NO: 1014 - RNA, 13 nt, Artificial Sequence
  Description of Artificial Sequence: Synthetic oligonucleotide
gucuaaguguuug

SEQ ID NO: 1015 - RNA, 11 nt, Artificial Sequence
  Description of Artificial Sequence: Synthetic oligonucleotide
ccugugacaaa

SEQ ID NO: 1016 - RNA, 12 nt, Artificial Sequence
  Description of Artificial Sequence: Synthetic oligonucleotide
caggcugaauua

SEQ ID NO: 1017 - RNA, 13 nt, Artificial Sequence
  Description of Artificial Sequence: Synthetic oligonucleotide
ucauucuuacaau

SEQ ID NO: 1018 - RNA, 14 nt, Artificial Sequence
  Description of Artificial Sequence: Synthetic oligonucleotide
cauucuuacaauug

SEQ ID NO: 1019 - RNA, 11 nt, Artificial Sequence
  Description of Artificial Sequence: Synthetic oligonucleotide
agagaguguac

SEQ ID NO: 1020 - RNA, 11 nt, Artificial Sequence
  Description of Artificial Sequence: Synthetic oligonucleotide
gaacucagcag

SEQ ID NO: 1021 - RNA, 12 nt, Artificial Sequence
  Description of Artificial Sequence: Synthetic oligonucleotide
uuauuuucagua

SEQ ID NO: 1022 - RNA, 11 nt, Artificial Sequence
  Description of Artificial Sequence: Synthetic oligonucleotide
cuuaaauggaa

SEQ ID NO: 1023 - RNA, 12 nt, Artificial Sequence
  Description of Artificial Sequence: Synthetic oligonucleotide
gccuaaaauugu

SEQ ID NO: 1024 - RNA, 12 nt, Artificial Sequence
  Description of Artificial Sequence: Synthetic oligonucleotide
acuaacaucugg

SEQ ID NO: 1025 - RNA, 11 nt, Artificial Sequence
  Description of Artificial Sequence: Synthetic oligonucleotide
gacugugagcu

SEQ ID NO: 1026 - RNA, 13 nt, Artificial Sequence
  Description of Artificial Sequence: Synthetic oligonucleotide
gcuuuuuauuaau

SEQ ID NO: 1027 - RNA, 12 nt, Artificial Sequence
  Description of Artificial Sequence: Synthetic oligonucleotide
ucuucuuacauu

SEQ ID NO: 1028 - RNA, 14 nt, Artificial Sequence
  Description of Artificial Sequence: Synthetic oligonucleotide
auuuguaaaaaugu

SEQ ID NO: 1029 - RNA, 14 nt, Artificial Sequence
  Description of Artificial Sequence: Synthetic oligonucleotide
ucuuaauucauauu

SEQ ID NO: 1030 - RNA, 12 nt, Artificial Sequence
  Description of Artificial Sequence: Synthetic oligonucleotide
aacuaaucauga

SEQ ID NO: 1031 - RNA, 11 nt, Artificial Sequence
  Description of Artificial Sequence: Synthetic oligonucleotide
cugcucuuggg

SEQ ID NO: 1032 - RNA, 12 nt, Artificial Sequence
  Description of Artificial Sequence: Synthetic oligonucleotide
aguagcuuugag

SEQ ID NO: 1033 - RNA, 13 nt, Artificial Sequence
  Description of Artificial Sequence: Synthetic oligonucleotide
acguaauauuuca

SEQ ID NO: 1034 - RNA, 12 nt, Artificial Sequence
  Description of Artificial Sequence: Synthetic oligonucleotide
auucucuucacu

SEQ ID NO: 1035 - RNA, 13 nt, Artificial Sequence
  Description of Artificial Sequence: Synthetic oligonucleotide
uaaugcuaagaaa

SEQ ID NO: 1036 - RNA, 11 nt, Artificial Sequence
  Description of Artificial Sequence: Synthetic oligonucleotide
cugaaaaucaa

SEQ ID NO: 1037 - RNA, 13 nt, Artificial Sequence
  Description of Artificial Sequence: Synthetic oligonucleotide
auaugauuacuuu

SEQ ID NO: 1038 - RNA, 13 nt, Artificial Sequence
  Description of Artificial Sequence: Synthetic oligonucleotide
auuuuguucuaca

SEQ ID NO: 1039 - RNA, 11 nt, Artificial Sequence
  Description of Artificial Sequence: Synthetic oligonucleotide
ccgggacucuc

SEQ ID NO: 1040 - RNA, 13 nt, Artificial Sequence
  Description of Artificial Sequence: Synthetic oligonucleotide
cuuuaaaguaaag

SEQ ID NO: 1041 - RNA, 12 nt, Artificial Sequence
  Description of Artificial Sequence: Synthetic oligonucleotide
cuggaagccugg

SEQ ID NO: 1042 - RNA, 13 nt, Artificial Sequence
  Description of Artificial Sequence: Synthetic oligonucleotide
aaacaaaagagag

SEQ ID NO: 1043 - RNA, 12 nt, Artificial Sequence
  Description of Artificial Sequence: Synthetic oligonucleotide
ucaguuaugccg

SEQ ID NO: 1044 - RNA, 12 nt, Artificial Sequence
  Description of Artificial Sequence: Synthetic oligonucleotide
aaaagaagucca

SEQ ID NO: 1045 - RNA, 10 nt, Artificial Sequence
  Description of Artificial Sequence: Synthetic oligonucleotide
ggugagguua

SEQ ID NO: 1046 - RNA, 10 nt, Artificial Sequence
  Description of Artificial Sequence: Synthetic oligonucleotide
ggaagaggac

SEQ ID NO: 1047 - RNA, 12 nt, Artificial Sequence
  Description of Artificial Sequence: Synthetic oligonucleotide
agcaaguauugu

SEQ ID NO: 1048 - RNA, 11 nt, Artificial Sequence
  Description of Artificial Sequence: Synthetic oligonucleotide
uuguagcacuc

SEQ ID NO: 1049 - RNA, 13 nt, Artificial Sequence
  Description of Artificial Sequence: Synthetic oligonucleotide
caaaaccacaaau

SEQ ID NO: 1050 - RNA, 11 nt, Artificial Sequence
  Description of Artificial Sequence: Synthetic oligonucleotide
aagcccauaca

SEQ ID NO: 1051 - RNA, 10 nt, Artificial Sequence
  Description of Artificial Sequence: Synthetic oligonucleotide
gcccauacag

SEQ ID NO: 1052 - RNA, 11 nt, Artificial Sequence
  Description of Artificial Sequence: Synthetic oligonucleotide
agaaaccuucc

SEQ ID NO: 1053 - RNA, 9 nt, Artificial Sequence
  Description of Artificial Sequence: Synthetic oligonucleotide
uauaccuac

SEQ ID NO: 1054 - RNA, 12 nt, Artificial Sequence
  Description of Artificial Sequence: Synthetic oligonucleotide
ccaguuuucgga

SEQ ID NO: 1055 - RNA, 8 nt, Artificial Sequence
  Description of Artificial Sequence: Synthetic oligonucleotide
gaacaggg

SEQ ID NO: 1056 - RNA, 12 nt, Artificial Sequence
  Description of Artificial Sequence: Synthetic oligonucleotide
uaacuuuccagu

SEQ ID NO: 1057 - RNA, 13 nt, Artificial Sequence
  Description of Artificial Sequence: Synthetic oligonucleotide
aaguuugguuuug

SEQ ID NO: 1058 - RNA, 11 nt, Artificial Sequence
  Description of Artificial Sequence: Synthetic oligonucleotide
uucccacugua

SEQ ID NO: 1059 - RNA, 12 nt, Artificial Sequence
  Description of Artificial Sequence: Synthetic oligonucleotide
gauaccauauga

SEQ ID NO: 1060 - RNA, 10 nt, Artificial Sequence
  Description of Artificial Sequence: Synthetic oligonucleotide
acaugggcug

SEQ ID NO: 1061 - RNA, 12 nt, Artificial Sequence
  Description of Artificial Sequence: Synthetic oligonucleotide
aacuuuuucaua

SEQ ID NO: 1062 - RNA, 11 nt, Artificial Sequence
  Description of Artificial Sequence: Synthetic oligonucleotide
augaggccgga

SEQ ID NO: 1063 - RNA, 10 nt, Artificial Sequence
  Description of Artificial Sequence: Synthetic oligonucleotide
cugcauuugu

SEQ ID NO: 1064 - RNA, 12 nt, Artificial Sequence
  Description of Artificial Sequence: Synthetic oligonucleotide
auguuuacuacc

SEQ ID NO: 1065 - RNA, 14 nt, Artificial Sequence
  Description of Artificial Sequence: Synthetic oligonucleotide
auuuuuugaugaaa

SEQ ID NO: 1066 - RNA, 13 nt, Artificial Sequence
  Description of Artificial Sequence: Synthetic oligonucleotide
agugugugaauuu

SEQ ID NO: 1067 - RNA, 12 nt, Artificial Sequence
  Description of Artificial Sequence: Synthetic oligonucleotide
agcaauguaugu

SEQ ID NO: 1068 - RNA, 13 nt, Artificial Sequence
  Description of Artificial Sequence: Synthetic oligonucleotide
aagcacauauaua

SEQ ID NO: 1069 - RNA, 13 nt, Artificial Sequence
  Description of Artificial Sequence: Synthetic oligonucleotide
uaauaguuucucc

SEQ ID NO: 1070 - RNA, 12 nt, Artificial Sequence
  Description of Artificial Sequence: Synthetic oligonucleotide
guuucuccaaau

SEQ ID NO: 1071 - RNA, 12 nt, Artificial Sequence
  Description of Artificial Sequence: Synthetic oligonucleotide
acuuccuagaaa

SEQ ID NO: 1072 - RNA, 12 nt, Artificial Sequence
  Description of Artificial Sequence: Synthetic oligonucleotide
acaccauauaug

SEQ ID NO: 1073 - RNA, 13 nt, Artificial Sequence
  Description of Artificial Sequence: Synthetic oligonucleotide
uauaugaauggag

SEQ ID NO: 1074 - RNA, 12 nt, Artificial Sequence
  Description of Artificial Sequence: Synthetic oligonucleotide
cauuuacaggga

SEQ ID NO: 1075 - RNA, 12 nt, Artificial Sequence
  Description of Artificial Sequence: Synthetic oligonucleotide
auuuacagggac

SEQ ID NO: 1076 - RNA, 9 nt, Artificial Sequence
  Description of Artificial Sequence: Synthetic oligonucleotide
gggaccuga

SEQ ID NO: 1077 - RNA, 13 nt, Artificial Sequence
  Description of Artificial Sequence: Synthetic oligonucleotide
guuugacugcauc

SEQ ID NO: 1078 - RNA, 12 nt, Artificial Sequence
  Description of Artificial Sequence: Synthetic oligonucleotide
uugacugcaucg

SEQ ID NO: 1079 - RNA, 11 nt, Artificial Sequence
  Description of Artificial Sequence: Synthetic oligonucleotide
aguucacaggg

SEQ ID NO: 1080 - RNA, 12 nt, Artificial Sequence
  Description of Artificial Sequence: Synthetic oligonucleotide
gcaccucugucc

SEQ ID NO: 1081 - RNA, 14 nt, Artificial Sequence
  Description of Artificial Sequence: Synthetic oligonucleotide
guuugucuuuuuaa

SEQ ID NO: 1082 - RNA, 13 nt, Artificial Sequence
  Description of Artificial Sequence: Synthetic oligonucleotide
uugucuuuuuaag

SEQ ID NO: 1083 - RNA, 12 nt, Artificial Sequence
  Description of Artificial Sequence: Synthetic oligonucleotide
cuaaagguuguc

SEQ ID NO: 1084 - RNA, 11 nt, Artificial Sequence
  Description of Artificial Sequence: Synthetic oligonucleotide
agguugucgac

SEQ ID NO: 1085 - RNA, 12 nt, Artificial Sequence
  Description of Artificial Sequence: Synthetic oligonucleotide
ccuggcaauugu

SEQ ID NO: 1086 - RNA, 11 nt, Artificial Sequence
  Description of Artificial Sequence: Synthetic oligonucleotide
guggugcgagg

SEQ ID NO: 1087 - RNA, 12 nt, Artificial Sequence
  Description of Artificial Sequence: Synthetic oligonucleotide
gagacaugaaau

SEQ ID NO: 1088 - RNA, 12 nt, Artificial Sequence
  Description of Artificial Sequence: Synthetic oligonucleotide
uauauuucucca

SEQ ID NO: 1089 - RNA, 9 nt, Artificial Sequence
  Description of Artificial Sequence: Synthetic oligonucleotide
augaaggcu

SEQ ID NO: 1090 - RNA, 10 nt, Artificial Sequence
  Description of Artificial Sequence: Synthetic oligonucleotide
cuggaguggu

SEQ ID NO: 1091 - RNA, 10 nt, Artificial Sequence
  Description of Artificial Sequence: Synthetic oligonucleotide
ggaagagagg

SEQ ID NO: 1092 - RNA, 11 nt, Artificial Sequence
  Description of Artificial Sequence: Synthetic oligonucleotide
uugcaucgggc

SEQ ID NO: 1093 - RNA, 12 nt, Artificial Sequence
  Description of Artificial Sequence: Synthetic oligonucleotide
uauccuacugug

SEQ ID NO: 1094 - RNA, 12 nt, Artificial Sequence
  Description of Artificial Sequence: Synthetic oligonucleotide
ccuacuguguaa

SEQ ID NO: 1095 - RNA, 11 nt, Artificial Sequence
  Description of Artificial Sequence: Synthetic oligonucleotide
cuuguagugua

SEQ ID NO: 1096 - RNA, 12 nt, Artificial Sequence
  Description of Artificial Sequence: Synthetic oligonucleotide
cuuuguugauug

SEQ ID NO: 1097 - RNA, 13 nt, Artificial Sequence
  Description of Artificial Sequence: Synthetic oligonucleotide
uuguugauugaaa

SEQ ID NO: 1098 - RNA, 14 nt, Artificial Sequence
  Description of Artificial Sequence: Synthetic oligonucleotide
ucuuuuucuuccau

SEQ ID NO: 1099 - RNA, 12 nt, Artificial Sequence
  Description of Artificial Sequence: Synthetic oligonucleotide
aucuuccuucua

SEQ ID NO: 1100 - RNA, 12 nt, Artificial Sequence
  Description of Artificial Sequence: Synthetic oligonucleotide
ugaaugcuucau

SEQ ID NO: 1101 - RNA, 12 nt, Artificial Sequence
  Description of Artificial Sequence: Synthetic oligonucleotide
gaaugcuucaug

SEQ ID NO: 1102 - RNA, 12 nt, Artificial Sequence
  Description of Artificial Sequence: Synthetic oligonucleotide
auucuacuuuga

SEQ ID NO: 1103 - RNA, 12 nt, Artificial Sequence
  Description of Artificial Sequence: Synthetic oligonucleotide
gcaacuacagac

SEQ ID NO: 1104 - RNA, 12 nt, Artificial Sequence
  Description of Artificial Sequence: Synthetic oligonucleotide
accaaggucaac

SEQ ID NO: 1105 - RNA, 12 nt, Artificial Sequence
  Description of Artificial Sequence: Synthetic oligonucleotide
gacuaucucgac

SEQ ID NO: 1106 - RNA, 12 nt, Artificial Sequence
  Description of Artificial Sequence: Synthetic oligonucleotide
accuucccaaac

SEQ ID NO: 1107 - RNA, 13 nt, Artificial Sequence
  Description of Artificial Sequence: Synthetic oligonucleotide
caagcuuagaacu

SEQ ID NO: 1108 - RNA, 14 nt, Artificial Sequence
  Description of Artificial Sequence: Synthetic oligonucleotide
gcuuagaacuuuaa

SEQ ID NO: 1109 - RNA, 13 nt, Artificial Sequence
  Description of Artificial Sequence: Synthetic oligonucleotide
aacuuuaagcaac

SEQ ID NO: 1110 - RNA, 10 nt, Artificial Sequence
  Description of Artificial Sequence: Synthetic oligonucleotide
agaccaccac

SEQ ID NO: 1111 - RNA, 13 nt, Artificial Sequence
  Description of Artificial Sequence: Synthetic oligonucleotide
cgagaaauaaagu

SEQ ID NO: 1112 - RNA, 13 nt, Artificial Sequence
  Description of Artificial Sequence: Synthetic oligonucleotide
gagaaauaaaguu

SEQ ID NO: 1113 - RNA, 11 nt, Artificial Sequence
  Description of Artificial Sequence: Synthetic oligonucleotide
ggaaaugaucc

SEQ ID NO: 1114 - RNA, 12 nt, Artificial Sequence
  Description of Artificial Sequence: Synthetic oligonucleotide
aagaaaugaaac

SEQ ID NO: 1115 - RNA, 12 nt, Artificial Sequence
  Description of Artificial Sequence: Synthetic oligonucleotide
uuuccauccucc

SEQ ID NO: 1116 - RNA, 14 nt, Artificial Sequence
  Description of Artificial Sequence: Synthetic oligonucleotide
cugaaaaucuuuga

SEQ ID NO: 1117 - RNA, 10 nt, Artificial Sequence
  Description of Artificial Sequence: Synthetic oligonucleotide
gccguucagg

SEQ ID NO: 1118 - RNA, 12 nt, Artificial Sequence
  Description of Artificial Sequence: Synthetic oligonucleotide
aggguccagaag

SEQ ID NO: 1119 - RNA, 12 nt, Artificial Sequence
  Description of Artificial Sequence: Synthetic oligonucleotide
caagacugcuug

SEQ ID NO: 1120 - RNA, 12 nt, Artificial Sequence
  Description of Artificial Sequence: Synthetic oligonucleotide
ccaugucuuugg

SEQ ID NO: 1121 - RNA, 10 nt, Artificial Sequence
  Description of Artificial Sequence: Synthetic oligonucleotide
ccugaaacac

SEQ ID NO: 1122 - RNA, 11 nt, Artificial Sequence
  Description of Artificial Sequence: Synthetic oligonucleotide
cucuguaccuc

SEQ ID NO: 1123 - RNA, 11 nt, Artificial Sequence
  Description of Artificial Sequence: Synthetic oligonucleotide
gcaagacaaga

SEQ ID NO: 1124 - RNA, 12 nt, Artificial Sequence
  Description of Artificial Sequence: Synthetic oligonucleotide
caagacaagaaa

SEQ ID NO: 1125 - RNA, 11 nt, Artificial Sequence
  Description of Artificial Sequence: Synthetic oligonucleotide
guacaagaucc

SEQ ID NO: 1126 - RNA, 11 nt, Artificial Sequence
  Description of Artificial Sequence: Synthetic oligonucleotide
guacuugcaga

SEQ ID NO: 1127 - RNA, 12 nt, Artificial Sequence
  Description of Artificial Sequence: Synthetic oligonucleotide
gaucgauacaga

SEQ ID NO: 1128 - RNA, 12 nt, Artificial Sequence
  Description of Artificial Sequence: Synthetic oligonucleotide
auaaaaauaaau

SEQ ID NO: 1129 - RNA, 12 nt, Artificial Sequence
  Description of Artificial Sequence: Synthetic oligonucleotide
aaaaauaaauau

SEQ ID NO: 1130 - RNA, 12 nt, Artificial Sequence
  Description of Artificial Sequence: Synthetic oligonucleotide
uugacugcugug

SEQ ID NO: 1131 - RNA, 12 nt, Artificial Sequence
  Description of Artificial Sequence: Synthetic oligonucleotide
gagaugagagac

SEQ ID NO: 1132 - RNA, 9 nt, Artificial Sequence
  Description of Artificial Sequence: Synthetic oligonucleotide
cccacuugg

SEQ ID NO: 1133 - RNA, 1061 nt, Homo sapiens
ugcccugcgcccgcaacccgagccgcacccgccgcggacggagcccaugcgcggggcgaaccgcgcgcccccgcccccgccccgccccggccucggccccggcccuggccccgggggcagucgcgccugugaacgguggggcaggagacccuguaggaggaccccgggccgcaggccccugaggagcgaugacggaauauaagcuggugguggugggcgccggcggugugggcaagagugcgcugaccauccagcugauccagaaccauuuuguggacgaauacgaccccacuauagaggauuccuaccggaagcagguggucauugauggggagacgugccuguuggacauccuggauaccgccggccaggaggaguacagcgccaugcgggaccaguacaugcgcaccggggagggcuuccuguguguguuugccaucaacaacaccaagucuuuugaggacauccaccaguacagggagcagaucaaacgggugaaggacucggaugacgugcccauggugcugguggggaacaagugugaccuggcugcacgcacuguggaaucucggcaggcucaggaccucgcccgaagcuacggcauccccuacaucgagaccucggccaagacccggcagggaguggaggaugccuucuacacguuggugcgugagauccggcagcacaagcugcggaagcugaacccuccugaugagaguggccccggcugcaugagcugcaagugugugcucuccugacgcagcacaagcucaggacauggaggugccggaugcaggaaggaggugcagacggaaggaggaggaaggaaggacggaagcaaggaaggaaggaagggcugcuggagcccagucaccccgggaccgugggccgaggugacugcagacccucccagggaggcugugcacagacugucuugaacaucccaaaugccaccggaaccccagcccuuagcuccccucccaggccucugugggcccuugucgggcacagaugggaucacaguaaauuauuggauggucuugaaaaaaaaaaaaaaaaaa

SEQ ID NO: 1134 - RNA, 1143 nt, Homo sapiens
ugcccugcgcccgcaacccgagccgcacccgccgcggacggagcccaugcgcggggcgaaccgcgcgcccccgcccccgccccgccccggccucggccccggcccuggccccgggggcagucgcgccugugaacgguggggcaggagacccuguaggaggaccccgggccgcaggccccugaggagcgaugacggaauauaagcuggugguggugggcgccggcggugugggcaagagugcgcugaccauccagcugauccagaaccauuuuguggacgaauacgaccccacuauagaggauuccuaccggaagcagguggucauugauggggagacgugccuguuggacauccuggauaccgccggccaggaggaguacagcgccaugcgggaccaguacaugcgcaccggggagggcuuccuguguguguuugccaucaacaacaccaagucuuuugaggacauccaccaguacagggagcagaucaaacgggugaaggacucggaugacgugcccauggugcugguggggaacaagugugaccuggcugcacgcacuguggaaucucggcaggcucaggaccucgcccgaagcuacggcauccccuacaucgagaccucggccaagacccggcagggcagccgcucuggcucuagcuccagcuccgggacccucugggaccccccgggacccaugugacccagcggccccucgcgcuggaguggaggaugccuucuacacguuggugcgugagauccggcagcacaagcugcggaagcugaacccuccugaugagaguggccccggcugcaugagcugcaagugugugcucuccugacgcagcacaagcucaggacauggaggugccggaugcaggaaggaggugcagacggaaggaggaggaaggaaggacggaagcaaggaaggaaggaagggcugcuggagcccagucaccccgggaccgugggccgaggugacugcagacccucccagggaggcugugcacagacugucuugaacaucccaaaugccaccggaaccccagcccuuagcuccccucccaggccucugugggcccuugucgggcacagaugggaucacaguaaauuauuggauggucuugaaaaaaaaaaaaaaaaaa

SEQ ID NO: 1135 - RNA, 19 nt, Artificial Sequence
  Description of Artificial Sequence: Synthetic oligonucleotide
ugcccugcgcccgcaaccc

SEQ ID NO: 1136 - RNA, 19 nt, Artificial Sequence
  Description of Artificial Sequence: Synthetic oligonucleotide
cgagccgcacccgccgcgg

SEQ ID NO: 1137 - RNA, 19 nt, Artificial Sequence
  Description of Artificial Sequence: Synthetic oligonucleotide
gacggagcccaugcgcggg

SEQ ID NO: 1138 - RNA, 19 nt, Artificial Sequence
  Description of Artificial Sequence: Synthetic oligonucleotide
ggcgaaccgcgcgcccccg

SEQ ID NO: 1139 - RNA, 19 nt, Artificial Sequence
  Description of Artificial Sequence: Synthetic oligonucleotide
gcccccgccccgccccggc

SEQ ID NO: 1140 - RNA, 19 nt, Artificial Sequence
  Description of Artificial Sequence: Synthetic oligonucleotide
ccucggccccggcccuggc

SEQ ID NO: 1141 - RNA, 19 nt, Artificial Sequence
  Description of Artificial Sequence: Synthetic oligonucleotide
ccccgggggcagucgcgcc

SEQ ID NO: 1142 - RNA, 19 nt, Artificial Sequence
  Description of Artificial Sequence: Synthetic oligonucleotide
cugugaacgguggggcagg

SEQ ID NO: 1143 - RNA, 19 nt, Artificial Sequence
  Description of Artificial Sequence: Synthetic oligonucleotide
gagacccuguaggaggacc

SEQ ID NO: 1144 - RNA, 19 nt, Artificial Sequence
  Description of Artificial Sequence: Synthetic oligonucleotide
cccgggccgcaggccccug

SEQ ID NO: 1145 - RNA, 19 nt, Artificial Sequence
  Description of Artificial Sequence: Synthetic oligonucleotide
gaggagcgaugacggaaua

SEQ ID NO: 1146 - RNA, 19 nt, Artificial Sequence
  Description of Artificial Sequence: Synthetic oligonucleotide
auaagcugguggugguggg

SEQ ID NO: 1147 - RNA, 19 nt, Artificial Sequence
  Description of Artificial Sequence: Synthetic oligonucleotide
gcgccggcggugugggcaa

SEQ ID NO: 1148 - RNA, 19 nt, Artificial Sequence
  Description of Artificial Sequence: Synthetic oligonucleotide
agagugcgcugaccaucca

SEQ ID NO: 1149 - RNA, 19 nt, Artificial Sequence
  Description of Artificial Sequence: Synthetic oligonucleotide
agcugauccagaaccauuu

SEQ ID NO: 1150 - RNA, 19 nt, Artificial Sequence
  Description of Artificial Sequence: Synthetic oligonucleotide
uuguggacgaauacgaccc

SEQ ID NO: 1151 - RNA, 19 nt, Artificial Sequence
  Description of Artificial Sequence: Synthetic oligonucleotide
ccacuauagaggauuccua

SEQ ID NO: 1152 - RNA, 19 nt, Artificial Sequence
  Description of Artificial Sequence: Synthetic oligonucleotide
accggaagcagguggucau

SEQ ID NO: 1153 - RNA, 19 nt, Artificial Sequence
  Description of Artificial Sequence: Synthetic oligonucleotide
uugauggggagacgugccu

SEQ ID NO: 1154 - RNA, 19 nt, Artificial Sequence
  Description of Artificial Sequence: Synthetic oligonucleotide
uguuggacauccuggauac

SEQ ID NO: 1155 - RNA, 19 nt, Artificial Sequence
  Description of Artificial Sequence: Synthetic oligonucleotide
ccgccggccaggaggagua

SEQ ID NO: 1156 - RNA, 19 nt, Artificial Sequence
  Description of Artificial Sequence: Synthetic oligonucleotide
acagcgccaugcgggacca

SEQ ID NO: 1157 - RNA, 19 nt, Artificial Sequence
  Description of Artificial Sequence: Synthetic oligonucleotide
aguacaugcgcaccgggga

SEQ ID NO: 1158 - RNA, 19 nt, Artificial Sequence
  Description of Artificial Sequence: Synthetic oligonucleotide
agggcuuccuguguguguu

SEQ ID NO: 1159 - RNA, 19 nt, Artificial Sequence
  Description of Artificial Sequence: Synthetic oligonucleotide
uugccaucaacaacaccaa

SEQ ID NO: 1160 - RNA, 19 nt, Artificial Sequence
  Description of Artificial Sequence: Synthetic oligonucleotide
agucuuuugaggacaucca

SEQ ID NO: 1161 - RNA, 19 nt, Artificial Sequence
  Description of Artificial Sequence: Synthetic oligonucleotide
accaguacagggagcagau

SEQ ID NO: 1162 - RNA, 19 nt, Artificial Sequence
  Description of Artificial Sequence: Synthetic oligonucleotide
ucaaacgggugaaggacuc

SEQ ID NO: 1163 - RNA, 19 nt, Artificial Sequence
  Description of Artificial Sequence: Synthetic oligonucleotide
cggaugacgugcccauggu

SEQ ID NO: 1164 - RNA, 19 nt, Artificial Sequence
  Description of Artificial Sequence: Synthetic oligonucleotide
ugcugguggggaacaagug

SEQ ID NO: 1165 - RNA, 19 nt, Artificial Sequence
  Description of Artificial Sequence: Synthetic oligonucleotide
gugaccuggcugcacgcac

SEQ ID NO: 1166 - RNA, 19 nt, Artificial Sequence
  Description of Artificial Sequence: Synthetic oligonucleotide
cuguggaaucucggcaggc

SEQ ID NO: 1167 - RNA, 19 nt, Artificial Sequence
  Description of Artificial Sequence: Synthetic oligonucleotide
cucaggaccucgcccgaag

SEQ ID NO: 1168 - RNA, 19 nt, Artificial Sequence
  Description of Artificial Sequence: Synthetic oligonucleotide
gcuacggcauccccuacau

SEQ ID NO: 1169 - RNA, 19 nt, Artificial Sequence
  Description of Artificial Sequence: Synthetic oligonucleotide
ucgagaccucggccaagac

SEQ ID NO: 1170 - RNA, 19 nt, Artificial Sequence
  Description of Artificial Sequence: Synthetic oligonucleotide
cccggcagggcagccgcuc

SEQ ID NO: 1171 - RNA, 19 nt, Artificial Sequence
  Description of Artificial Sequence: Synthetic oligonucleotide
cuggcucuagcuccagcuc

SEQ ID NO: 1172 - RNA, 19 nt, Artificial Sequence
  Description of Artificial Sequence: Synthetic oligonucleotide
ccgggacccucugggaccc

SEQ ID NO: 1173 - RNA, 19 nt, Artificial Sequence
  Description of Artificial Sequence: Synthetic oligonucleotide
ccccgggacccaugugacc

SEQ ID NO: 1174 - RNA, 19 nt, Artificial Sequence
  Description of Artificial Sequence: Synthetic oligonucleotide
ccagcggccccucgcgcug

SEQ ID NO: 1175 - RNA, 19 nt, Artificial Sequence
  Description of Artificial Sequence: Synthetic oligonucleotide
ggaguggaggaugccuucu

SEQ ID NO: 1176 - RNA, 19 nt, Artificial Sequence
  Description of Artificial Sequence: Synthetic oligonucleotide
uacacguuggugcgugaga

SEQ ID NO: 1177 - RNA, 19 nt, Artificial Sequence
  Description of Artificial Sequence: Synthetic oligonucleotide
auccggcagcacaagcugc

SEQ ID NO: 1178 - RNA, 19 nt, Artificial Sequence
  Description of Artificial Sequence: Synthetic oligonucleotide
cggaagcugaacccuccug

SEQ ID NO: 1179 - RNA, 19 nt, Artificial Sequence
  Description of Artificial Sequence: Synthetic oligonucleotide
gaugagaguggccccggcu

SEQ ID NO: 1180 - RNA, 19 nt, Artificial Sequence
  Description of Artificial Sequence: Synthetic oligonucleotide
ugcaugagcugcaagugug

SEQ ID NO: 1181 - RNA, 19 nt, Artificial Sequence
  Description of Artificial Sequence: Synthetic oligonucleotide
gugcucuccugacgcagca

SEQ ID NO: 1182 - RNA, 19 nt, Artificial Sequence
  Description of Artificial Sequence: Synthetic oligonucleotide
acaagcucaggacauggag

SEQ ID NO: 1183 - RNA, 19 nt, Artificial Sequence
  Description of Artificial Sequence: Synthetic oligonucleotide
ggugccggaugcaggaagg

SEQ ID NO: 1184 - RNA, 19 nt, Artificial Sequence
  Description of Artificial Sequence: Synthetic oligonucleotide
gaggugcagacggaaggag

SEQ ID NO: 1185 - RNA, 19 nt, Artificial Sequence
  Description of Artificial Sequence: Synthetic oligonucleotide
ggaggaaggaaggacggaa

SEQ ID NO: 1186 - RNA, 19 nt, Artificial Sequence
  Description of Artificial Sequence: Synthetic oligonucleotide
agcaaggaaggaaggaagg

SEQ ID NO: 1187 - RNA, 19 nt, Artificial Sequence
  Description of Artificial Sequence: Synthetic oligonucleotide
ggcugcuggagcccaguca

SEQ ID NO: 1188 - RNA, 19 nt, Artificial Sequence
  Description of Artificial Sequence: Synthetic oligonucleotide
accccgggaccgugggccg

SEQ ID NO: 1189 - RNA, 19 nt, Artificial Sequence
  Description of Artificial Sequence: Synthetic oligonucleotide
gaggugacugcagacccuc

SEQ ID NO: 1190 - RNA, 19 nt, Artificial Sequence
  Description of Artificial Sequence: Synthetic oligonucleotide
cccagggaggcugugcaca

SEQ ID NO: 1191 - RNA, 19 nt, Artificial Sequence
  Description of Artificial Sequence: Synthetic oligonucleotide
agacugucuugaacauccc

SEQ ID NO: 1192 - RNA, 19 nt, Artificial Sequence
  Description of Artificial Sequence: Synthetic oligonucleotide
caaaugccaccggaacccc

SEQ ID NO: 1193 - RNA, 19 nt, Artificial Sequence
  Description of Artificial Sequence: Synthetic oligonucleotide
cagcccuuagcuccccucc

SEQ ID NO: 1194 - RNA, 19 nt, Artificial Sequence
  Description of Artificial Sequence: Synthetic oligonucleotide
ccaggccucugugggcccu

SEQ ID NO: 1195 - RNA, 19 nt, Artificial Sequence
  Description of Artificial Sequence: Synthetic oligonucleotide
uugucgggcacagauggga

SEQ ID NO: 1196 - RNA, 19 nt, Artificial Sequence
  Description of Artificial Sequence: Synthetic oligonucleotide
aucacaguaaauuauugga

SEQ ID NO: 1197 - RNA, 19 nt, Artificial Sequence
  Description of Artificial Sequence: Synthetic oligonucleotide
cccggcagggaguggagga

SEQ ID NO: 1198 - RNA, 19 nt, Artificial Sequence
  Description of Artificial Sequence: Synthetic oligonucleotide
augccuucuacacguuggu

SEQ ID NO: 1199 - RNA, 19 nt, Artificial Sequence
  Description of Artificial Sequence: Synthetic oligonucleotide
ugcgugagauccggcagca

SEQ ID NO: 1200 - RNA, 19 nt, Artificial Sequence
  Description of Artificial Sequence: Synthetic oligonucleotide
acaagcugcggaagcugaa

SEQ ID NO: 1201 - RNA, 19 nt, Artificial Sequence
  Description of Artificial Sequence: Synthetic oligonucleotide
acccuccugaugagagugg

SEQ ID NO: 1202 - RNA, 19 nt, Artificial Sequence
  Description of Artificial Sequence: Synthetic oligonucleotide
gccccggcugcaugagcug

SEQ ID NO: 1203 - RNA, 19 nt, Artificial Sequence
  Description of Artificial Sequence: Synthetic oligonucleotide
gcaagugugugcucuccug

SEQ ID NO: 1204 - RNA, 19 nt, Artificial Sequence
  Description of Artificial Sequence: Synthetic oligonucleotide
gacgcagcacaagcucagg

SEQ ID NO: 1205 - RNA, 19 nt, Artificial Sequence
  Description of Artificial Sequence: Synthetic oligonucleotide
gacauggaggugccggaug

SEQ ID NO: 1206 - RNA, 19 nt, Artificial Sequence
  Description of Artificial Sequence: Synthetic oligonucleotide
gcaggaaggaggugcagac

SEQ ID NO: 1207 - RNA, 19 nt, Artificial Sequence
  Description of Artificial Sequence: Synthetic oligonucleotide
cggaaggaggaggaaggaa

SEQ ID NO: 1208 - RNA, 19 nt, Artificial Sequence
  Description of Artificial Sequence: Synthetic oligonucleotide
aggacggaagcaaggaagg

SEQ ID NO: 1209 - RNA, 19 nt, Artificial Sequence
  Description of Artificial Sequence: Synthetic oligonucleotide
gaaggaagggcugcuggag

SEQ ID NO: 1210 - RNA, 19 nt, Artificial Sequence
  Description of Artificial Sequence: Synthetic oligonucleotide
gcccagucaccccgggacc

SEQ ID NO: 1211 - RNA, 19 nt, Artificial Sequence
  Description of Artificial Sequence: Synthetic oligonucleotide
cgugggccgaggugacugc

SEQ ID NO: 1212 - RNA, 19 nt, Artificial Sequence
  Description of Artificial Sequence: Synthetic oligonucleotide
cagacccucccagggaggc

SEQ ID NO: 1213 - RNA, 19 nt, Artificial Sequence
  Description of Artificial Sequence: Synthetic oligonucleotide
cugugcacagacugucuug

SEQ ID NO: 1214 - RNA, 19 nt, Artificial Sequence
  Description of Artificial Sequence: Synthetic oligonucleotide
gaacaucccaaaugccacc

SEQ ID NO: 1215 - RNA, 19 nt, Artificial Sequence
  Description of Artificial Sequence: Synthetic oligonucleotide
cggaaccccagcccuuagc

SEQ ID NO: 1216 - RNA, 19 nt, Artificial Sequence
  Description of Artificial Sequence: Synthetic oligonucleotide
cuccccucccaggccucug

SEQ ID NO: 1217 - RNA, 19 nt, Artificial Sequence
  Description of Artificial Sequence: Synthetic oligonucleotide
gugggcccuugucgggcac

SEQ ID NO: 1218 - RNA, 19 nt, Artificial Sequence
  Description of Artificial Sequence: Synthetic oligonucleotide
cagaugggaucacaguaaa

SEQ ID NO: 1219 - RNA, 19 nt, Artificial Sequence
  Description of Artificial Sequence: Synthetic oligonucleotide
auuauuggauggucuugaa

SEQ ID NO: 1220 - RNA, 25 nt, Artificial Sequence
  Description of Artificial Sequence: Synthetic oligonucleotide
ugcccugcgcccgcaacccgagccg

SEQ ID NO: 1221 - RNA, 25 nt, Artificial Sequence
  Description of Artificial Sequence: Synthetic oligonucleotide
gcacccgccgcggacggagcccaug

SEQ ID NO: 1222 - RNA, 25 nt, Artificial Sequence
  Description of Artificial Sequence: Synthetic oligonucleotide
gcgcggggcgaaccgcgcgcccccg

SEQ ID NO: 1223 - RNA, 25 nt, Artificial Sequence
  Description of Artificial Sequence: Synthetic oligonucleotide
gcccccgccccgccccggccucggc

SEQ ID NO: 1224 - RNA, 25 nt, Artificial Sequence
  Description of Artificial Sequence: Synthetic oligonucleotide
ccccggcccuggccccgggggcagu

SEQ ID NO: 1225 - RNA, 25 nt, Artificial Sequence
  Description of Artificial Sequence: Synthetic oligonucleotide
ucgcgccugugaacgguggggcagg

SEQ ID NO: 1226 - RNA, 25 nt, Artificial Sequence
  Description of Artificial Sequence: Synthetic oligonucleotide
gagacccuguaggaggaccccgggc

SEQ ID NO: 1227 - RNA, 25 nt, Artificial Sequence
  Description of Artificial Sequence: Synthetic oligonucleotide
ccgcaggccccugaggagcgaugac

SEQ ID NO: 1228 - RNA, 25 nt, Artificial Sequence
  Description of Artificial Sequence: Synthetic oligonucleotide
cggaauauaagcugguggugguggg

SEQ ID NO: 1229 - RNA, 25 nt, Artificial Sequence
  Description of Artificial Sequence: Synthetic oligonucleotide
gcgccggcggugugggcaagagugc

SEQ ID NO: 1230 - RNA, 25 nt, Artificial Sequence
  Description of Artificial Sequence: Synthetic oligonucleotide
cgcugaccauccagcugauccagaa

SEQ ID NO: 1231 - RNA, 25 nt, Artificial Sequence
  Description of Artificial Sequence: Synthetic oligonucleotide
accauuuuguggacgaauacgaccc

SEQ ID NO: 1232 - RNA, 25 nt, Artificial Sequence
  Description of Artificial Sequence: Synthetic oligonucleotide
ccacuauagaggauuccuaccggaa

SEQ ID NO: 1233 - RNA, 25 nt, Artificial Sequence
  Description of Artificial Sequence: Synthetic oligonucleotide
agcagguggucauugauggggagac

SEQ ID NO: 1234 - RNA, 25 nt, Artificial Sequence
  Description of Artificial Sequence: Synthetic oligonucleotide
cgugccuguuggacauccuggauac

SEQ ID NO: 1235 - RNA, 25 nt, Artificial Sequence
  Description of Artificial Sequence: Synthetic oligonucleotide
ccgccggccaggaggaguacagcgc

SEQ ID NO: 1236 - RNA, 25 nt, Artificial Sequence
  Description of Artificial Sequence: Synthetic oligonucleotide
ccaugcgggaccaguacaugcgcac

SEQ ID NO: 1237 - RNA, 25 nt, Artificial Sequence
  Description of Artificial Sequence: Synthetic oligonucleotide
ccggggagggcuuccuguguguguu

SEQ ID NO: 1238 - RNA, 25 nt, Artificial Sequence
  Description of Artificial Sequence: Synthetic oligonucleotide
uugccaucaacaacaccaagucuuu

SEQ ID NO: 1239 - RNA, 25 nt, Artificial Sequence
  Description of Artificial Sequence: Synthetic oligonucleotide
uugaggacauccaccaguacaggga

SEQ ID NO: 1240 - RNA, 25 nt, Artificial Sequence
  Description of Artificial Sequence: Synthetic oligonucleotide
agcagaucaaacgggugaaggacuc

SEQ ID NO: 1241 - RNA, 25 nt, Artificial Sequence
  Description of Artificial Sequence: Synthetic oligonucleotide
cggaugacgugcccauggugcuggu

SEQ ID NO: 1242 - RNA, 25 nt, Artificial Sequence
  Description of Artificial Sequence: Synthetic oligonucleotide
uggggaacaagugugaccuggcugc

SEQ ID NO: 1243 - RNA, 25 nt, Artificial Sequence
  Description of Artificial Sequence: Synthetic oligonucleotide
cacgcacuguggaaucucggcaggc

SEQ ID NO: 1244 - RNA, 25 nt, Artificial Sequence
  Description of Artificial Sequence: Synthetic oligonucleotide
cucaggaccucgcccgaagcuacgg

SEQ ID NO: 1245 - RNA, 25 nt, Artificial Sequence
  Description of Artificial Sequence: Synthetic oligonucleotide
gcauccccuacaucgagaccucggc

SEQ ID NO: 1246 - RNA, 25 nt, Artificial Sequence
  Description of Artificial Sequence: Synthetic oligonucleotide
ccaagacccggcagggcagccgcuc

SEQ ID NO: 1247 - RNA, 25 nt, Artificial Sequence
  Description of Artificial Sequence: Synthetic oligonucleotide
cuggcucuagcuccagcuccgggac

SEQ ID NO: 1248 - RNA, 25 nt, Artificial Sequence
  Description of Artificial Sequence: Synthetic oligonucleotide
cccucugggaccccccgggacccau

SEQ ID NO: 1249 - RNA, 25 nt, Artificial Sequence
  Description of Artificial Sequence: Synthetic oligonucleotide
ugugacccagcggccccucgcgcug

SEQ ID NO: 1250 - RNA, 25 nt, Artificial Sequence
  Description of Artificial Sequence: Synthetic oligonucleotide
ggaguggaggaugccuucuacacgu

SEQ ID NO: 1251 - RNA, 25 nt, Artificial Sequence
  Description of Artificial Sequence: Synthetic oligonucleotide
uuggugcgugagauccggcagcaca

SEQ ID NO: 1252 - RNA, 25 nt, Artificial Sequence
  Description of Artificial Sequence: Synthetic oligonucleotide
aagcugcggaagcugaacccuccug

SEQ ID NO: 1253 - RNA, 25 nt, Artificial Sequence
  Description of Artificial Sequence: Synthetic oligonucleotide
gaugagaguggccccggcugcauga

SEQ ID NO: 1254 - RNA, 25 nt, Artificial Sequence
  Description of Artificial Sequence: Synthetic oligonucleotide
agcugcaagugugugcucuccugac

SEQ ID NO: 1255 - RNA, 25 nt, Artificial Sequence
  Description of Artificial Sequence: Synthetic oligonucleotide
cgcagcacaagcucaggacauggag

SEQ ID NO: 1256 - RNA, 25 nt, Artificial Sequence
  Description of Artificial Sequence: Synthetic oligonucleotide
ggugccggaugcaggaaggaggugc

SEQ ID NO: 1257 - RNA, 25 nt, Artificial Sequence
  Description of Artificial Sequence: Synthetic oligonucleotide
cagacggaaggaggaggaaggaagg

SEQ ID NO: 1258 - RNA, 25 nt, Artificial Sequence
  Description of Artificial Sequence: Synthetic oligonucleotide
gacggaagcaaggaaggaaggaagg

SEQ ID NO: 1259 - RNA, 25 nt, Artificial Sequence
  Description of Artificial Sequence: Synthetic oligonucleotide
ggcugcuggagcccagucaccccgg

SEQ ID NO: 1260 - RNA, 25 nt, Artificial Sequence
  Description of Artificial Sequence: Synthetic oligonucleotide
ggaccgugggccgaggugacugcag

SEQ ID NO: 1261 - RNA, 25 nt, Artificial Sequence
  Description of Artificial Sequence: Synthetic oligonucleotide
gacccucccagggaggcugugcaca

SEQ ID NO: 1262 - RNA, 25 nt, Artificial Sequence
  Description of Artificial Sequence: Synthetic oligonucleotide
agacugucuugaacaucccaaaugc

SEQ ID NO: 1263 - RNA, 25 nt, Artificial Sequence
  Description of Artificial Sequence: Synthetic oligonucleotide
ccaccggaaccccagcccuuagcuc

SEQ ID NO: 1264 - RNA, 25 nt, Artificial Sequence
  Description of Artificial Sequence: Synthetic oligonucleotide
ccccucccaggccucugugggcccu

SEQ ID NO: 1265 - RNA, 25 nt, Artificial Sequence
  Description of Artificial Sequence: Synthetic oligonucleotide
uugucgggcacagaugggaucacag

SEQ ID NO: 1266 - RNA, 25 nt, Artificial Sequence
  Description of Artificial Sequence: Synthetic oligonucleotide
guaaauuauuggauggucuugaaaa

SEQ ID NO: 1267 - RNA, 25 nt, Artificial Sequence
  Description of Artificial Sequence: Synthetic oligonucleotide
ccaagacccggcagggaguggagga

SEQ ID NO: 1268 - RNA, 25 nt, Artificial Sequence
  Description of Artificial Sequence: Synthetic oligonucleotide
augccuucuacacguuggugcguga

SEQ ID NO: 1269 - RNA, 25 nt, Artificial Sequence
  Description of Artificial Sequence: Synthetic oligonucleotide
agauccggcagcacaagcugcggaa

SEQ ID NO: 1270 - RNA, 25 nt, Artificial Sequence
  Description of Artificial Sequence: Synthetic oligonucleotide
agcugaacccuccugaugagagugg

SEQ ID NO: 1271 - RNA, 25 nt, Artificial Sequence
  Description of Artificial Sequence: Synthetic oligonucleotide
gccccggcugcaugagcugcaagug

SEQ ID NO: 1272 - RNA, 25 nt, Artificial Sequence
  Description of Artificial Sequence: Synthetic oligonucleotide
gugugcucuccugacgcagcacaag

SEQ ID NO: 1273 - RNA, 25 nt, Artificial Sequence
  Description of Artificial Sequence: Synthetic oligonucleotide
gcucaggacauggaggugccggaug

SEQ ID NO: 1274 - RNA, 25 nt, Artificial Sequence
  Description of Artificial Sequence: Synthetic oligonucleotide
gcaggaaggaggugcagacggaagg

SEQ ID NO: 1275 - RNA, 25 nt, Artificial Sequence
  Description of Artificial Sequence: Synthetic oligonucleotide
gaggaggaaggaaggacggaagcaa

SEQ ID NO: 1276 - RNA, 25 nt, Artificial Sequence
  Description of Artificial Sequence: Synthetic oligonucleotide
aggaaggaaggaagggcugcuggag

SEQ ID NO: 1277 - RNA, 25 nt, Artificial Sequence
  Description of Artificial Sequence: Synthetic oligonucleotide
gcccagucaccccgggaccgugggc

SEQ ID NO: 1278 - RNA, 25 nt, Artificial Sequence
  Description of Artificial Sequence: Synthetic oligonucleotide
ccgaggugacugcagacccucccag

SEQ ID NO: 1279 - RNA, 25 nt, Artificial Sequence
  Description of Artificial Sequence: Synthetic oligonucleotide
gggaggcugugcacagacugucuug

SEQ ID NO: 1280 - RNA, 25 nt, Artificial Sequence
  Description of Artificial Sequence: Synthetic oligonucleotide
gaacaucccaaaugccaccggaacc

SEQ ID NO: 1281 - RNA, 25 nt, Artificial Sequence
  Description of Artificial Sequence: Synthetic oligonucleotide
cccagcccuuagcuccccucccagg

SEQ ID NO: 1282 - RNA, 25 nt, Artificial Sequence
  Description of Artificial Sequence: Synthetic oligonucleotide
gccucugugggcccuugucgggcac

SEQ ID NO: 1283 - RNA, 25 nt, Artificial Sequence
  Description of Artificial Sequence: Synthetic oligonucleotide
cagaugggaucacaguaaauuauug

SEQ ID NO: 1284 - RNA, 5436 nt, Homo sapiens
ggccgcggcggcggaggcagcagcggcggcggcaguggcggcggcgaagguggcggcggcucggccaguacucccggcccccgccauuucggacugggagcgagcgcggcgcaggcacugaaggcggcggcggggccagaggcucagcggcucccaggugcgggagagaggccugcugaaaaugacugaauauaaacuugugguaguuggagcugguggcguaggcaagagugccuugacgauacagcuaauucagaaucauuuuguggacgaauaugauccaacaauagaggauuccuacaggaagcaaguaguaauugauggagaaaccugucucuuggauauucucgacacagcaggucaagaggaguacagugcaaugagggaccaguacaugaggacuggggagggcuuucuuuguguauuugccauaaauaauacuaaaucauuugaagauauucaccauuauagagaacaaauuaaaagaguuaaggacucugaagauguaccuaugguccuaguaggaaauaaaugugauuugccuucuagaacaguagacacaaaacaggcucaggacuuagcaagaaguuauggaauuccuuuuauugaaacaucagcaaagacaagacagagaguggaggaugcuuuuuauacauuggugagggagauccgacaauacagauugaaaaaaaucagcaaagaagaaaagacuccuggcugugugaaaauuaaaaaaugcauuauaauguaaucuggguguugaugaugccuucuauacauuaguucgagaaauucgaaaacauaaagaaaagaugagcaaagaugguaaaaagaagaaaaagaagucaaagacaaaguguguaauuauguaaauacaauuuguacuuuuuucuuaaggcauacuaguacaagugguaauuuuuguacauuacacuaaauuauuagcauuuguuuuagcauuaccuaauuuuuuuccugcuccaugcagacuguuagcuuuuaccuuaaaugcuuauuuuaaaaugacaguggaaguuuuuuuuuccucuaagugccaguauucccagaguuuugguuuuugaacuagcaaugccugugaaaaagaaacugaauaccuaagauuucugucuugggguuuuuggugcaugcaguugauuacuucuuauuuuucuuaccaauugugaauguuggugugaaacaaauuaaugaagcuuuugaaucaucccuauucuguguuuuaucuagucacauaaauggauuaauuacuaauuucaguugagaccuucuaauugguuuuuacugaaacauugagggaacacaaauuuaugggcuuccugaugaugauucuucuaggcaucauguccuauaguuugucaucccugaugaauguaaaguuacacuguucacaaagguuuugucuccuuuccacugcuauuagucauggucacucuccccaaaauauuauauuuuuucuauaaaaagaaaaaaauggaaaaaaauuacaaggcaauggaaacuauuauaaggccauuuccuuuucacauuagauaaauuacuauaaagacuccuaauagcuuuuccuguuaaggcagacccaguaugaaauggggauuauuauagcaaccauuuuggggcuauauuuacaugcuacuaaauuuuuauaauaauugaaaagauuuuaacaaguauaaaaaauucucauaggaauuaaauguagucucccugugucagacugcucuuucauaguauaacuuuaaaucuuuucuucaacuugagucuuugaagauaguuuuaauucugcuugugacauuaaaagauuauuugggccaguuauagcuuauuagguguugaagagaccaagguugcaaggccaggcccugugugaaccuuugagcuuucauagagaguuucacagcauggacuguguccccacggucauccaguguugucaugcauugguuagucaaaauggggagggacuagggcaguuuggauagcucaacaagauacaaucucacucuguggugguccugcugacaaaucaagagcauugcuuuuguuucuuaagaaaacaaacucuuuuuuaaaaauuacuuuuaaauauuaacucaaaaguugagauuuuggggugguggugugccaagacauuaauuuuuuuuuuaaacaaugaagugaaaaaguuuuacaaucucuagguuuggcuaguucucuuaacacugguuaaauuaacauugcauaaacacuuuucaagucugauccauauuuaauaaugcuuuaaaauaaaaauaaaaacaauccuuuugauaaauuuaaaauguuacuuauuuuaaaauaaaugaagugagauggcauggugaggugaaaguaucacuggacuaggaagaaggugacuuagguucuagauaggugucuuuuaggacucugauuuugaggacaucacuuacuauccauuucuucauguuaaaagaagucaucucaaacucuuaguuuuuuuuuuuuacaacuauguaauuuauauuccauuuacauaaggauacacuuauuugucaagcucagcacaaucuguaaauuuuuaaccuauguuacaccaucuucagugccagucuugggcaaaauugugcaagaggugaaguuuauauuugaauauccauucucguuuuaggacucuucuuccauauuagugucaucuugccucccuaccuuccacaugccccaugacuugaugcaguuuuaauacuuguaauuccccuaaccauaagauuuacugcugcuguggauaucuccaugaaguuuucccacugagucacaucagaaaugcccuacaucuuauuuccucagggcucaagagaaucugacagauaccauaaagggauuugaccuaaucacuaauuuucaggugguggcugaugcuuugaacaucucuuugcugcccaauccauuagcgacaguaggauuuuucaaaccugguaugaauagacagaacccuauccaguggaaggagaauuuaauaaagauagugcugaaagaauuccuuagguaaucuauaacuaggacuacuccugguaacaguaauacauuccauuguuuuaguaaccagaaaucuucaugcaaugaaaaauacuuuaauucaugaagcuuacuuuuuuuuuuuggugucagagucucgcucuugucacccaggcuggaaugcaguggcgccaucucagcucacugcaaccuccaucucccagguucaagcgauucucgugccucggccuccugaguagcugggauuacaggcgugugccacuacacucaacuaauuuuuguauuuuuaggagagacgggguuucacccuguuggccaggcuggucucgaacuccugaccucaagugauucacccaccuuggccucauaaaccuguuuugcagaacucauuuauucagcaaauauuuauugagugccuaccagaugccagucaccgcacaaggcacuggguauaugguauccccaaacaagagacauaaucccgguccuuagguagugcuaguguggucuguaauaucuuacuaaggccuuugguauacgacccagagauaacacgaugcguauuuuaguuuugcaaagaagggguuuggucucugugccagcucuauaauuguuuugcuacgauuccacugaaacucuucgaucaagcuacuuuauguaaaucacuucauuguuuuaaaggaauaaacuugauuauauuguuuuuuuauuuggcauaacugugauucuuuuaggacaauuacuguacacauuaagguguaugucagauauucauauugacccaaauguguaauauuccaguuuucucugcauaaguaauuaaaauauacuuaaaaauuaauaguuuuaucuggguacaaauaaacaggugccugaacuaguucacagacaaggaaacuucuauguaaaaaucacuaugauuucugaauugcuaugugaaacuacagaucuuuggaacacuguuuagguaggguguuaagacuuacacaguaccucguuucuacacagagaaagaaauggccauacuucaggaacugcagugcuuaugaggggauauuuaggccucuugaauuuuugauguagaugggcauuuuuuuaagguagugguuaauuaccuuuaugugaacuuugaaugguuuaacaaaagauuuguuuuuguagagauuuuaaagggggagaauucuagaaauaaauguuaccuaauuauuacagccuuaaagacaaaaauccuuguugaaguuuuuuuaaaaaaagcuaaauuacauagacuuaggcauuaacauguuuguggaagaauauagcagacguauauuguaucauuugagugaauguucccaaguaggcauucuaggcucuauuuaacugagucacacugcauaggaauuuagaaccuaacuuuuauagguuaucaaaacuguugucaccauugcacaauuuuguccuaauauauacauagaaacuuuguggggcauguuaaguuacaguuugcacaaguucaucucauuuguauuccauugauuuuuuuuuucuucuaaacauuuuuucuucaaacaguauauaacuuuuuuuaggggauuuuuuuuuagacagcaaaaacuaucugaagauuuccauuugucaaaaaguaaugauuucuugauaauuguguaguaauguuuuuuagaacccagcaguuaccuuaaagcugaauuuauauuuaguaacuucuguguuaauacuggauagcaugaauucugcauugagaaacugaauagcugucauaaaaugaaacuuucuuucuaaagaaagauacucacaugaguucuugaagaauagucauaacuagauuaagaucuguguuuuaguuuaauaguuugaagugccuguuugggauaaugauagguaauuuagaugaauuuaggggaaaaaaaaguuaucugcagauauguugagggcccaucucuccccccacacccccacagagcuaacuggguuacaguguuuuauccgaaaguuuccaauuccacugucuuguguuuucauguugaaaauacuuuugcauuuuuccuuugagugccaauuucuuacuaguacuauuucuuaauguaacauguuuaccuggaauguauuuuaacuauuuuuguauaguguaaacugaaacaugcacauuuuguacauugugcuuucuuuugugggacauaugcagugugauccaguuguuuuccaucauuugguugcgcugaccuaggaauguuggucauaucaaacauuaaaaaugaccacucuuuuaauugaaauuaacuuuuaaauguuuauaggaguaugugcugugaagugaucuaaaauuuguaauauuuuugucaugaacuguacuacuccuaauuauuguaauguaauaaaaauaguuacagugacaaaaaaaaaaaaaaa

SEQ ID NO: 1285 - RNA, 5312 nt, Homo sapiens
ggccgcggcggcggaggcagcagcggcggcggcaguggcggcggcgaagguggcggcggcucggccaguacucccggcccccgccauuucggacugggagcgagcgcggcgcaggcacugaaggcggcggcggggccagaggcucagcggcucccaggugcgggagagaggccugcugaaaaugacugaauauaaacuugugguaguuggagcugguggcguaggcaagagugccuugacgauacagcuaauucagaaucauuuuguggacgaauaugauccaacaauagaggauuccuacaggaagcaaguaguaauugauggagaaaccugucucuuggauauucucgacacagcaggucaagaggaguacagugcaaugagggaccaguacaugaggacuggggagggcuuucuuuguguauuugccauaaauaauacuaaaucauuugaagauauucaccauuauagagaacaaauuaaaagaguuaaggacucugaagauguaccuaugguccuaguaggaaauaaaugugauuugccuucuagaacaguagacacaaaacaggcucaggacuuagcaagaaguuauggaauuccuuuuauugaaacaucagcaaagacaagacaggguguugaugaugccuucuauacauuaguucgagaaauucgaaaacauaaagaaaagaugagcaaagaugguaaaaagaagaaaaagaagucaaagacaaaguguguaauuauguaaauacaauuuguacuuuuuucuuaaggcauacuaguacaagugguaauuuuuguacauuacacuaaauuauuagcauuuguuuuagcauuaccuaauuuuuuuccugcuccaugcagacuguuagcuuuuaccuuaaaugcuuauuuuaaaaugacaguggaaguuuuuuuuuccucuaagugccaguauucccagaguuuugguuuuugaacuagcaaugccugugaaaaagaaacugaauaccuaagauuucugucuugggguuuuuggugcaugcaguugauuacuucuuauuuuucuuaccaauugugaauguuggugugaaacaaauuaaugaagcuuuugaaucaucccuauucuguguuuuaucuagucacauaaauggauuaauuacuaauuucaguugagaccuucuaauugguuuuuacugaaacauugagggaacacaaauuuaugggcuuccugaugaugauucuucuaggcaucauguccuauaguuugucaucccugaugaauguaaaguuacacuguucacaaagguuuugucuccuuuccacugcuauuagucauggucacucuccccaaaauauuauauuuuuucuauaaaaagaaaaaaauggaaaaaaauuacaaggcaauggaaacuauuauaaggccauuuccuuuucacauuagauaaauuacuauaaagacuccuaauagcuuuuccuguuaaggcagacccaguaugaaauggggauuauuauagcaaccauuuuggggcuauauuuacaugcuacuaaauuuuuauaauaauugaaaagauuuuaacaaguauaaaaaauucucauaggaauuaaauguagucucccugugucagacugcucuuucauaguauaacuuuaaaucuuuucuucaacuugagucuuugaagauaguuuuaauucugcuugugacauuaaaagauuauuugggccaguuauagcuuauuagguguugaagagaccaagguugcaaggccaggcccugugugaaccuuugagcuuucauagagaguuucacagcauggacuguguccccacggucauccaguguugucaugcauugguuagucaaaauggggagggacuagggcaguuuggauagcucaacaagauacaaucucacucuguggugguccugcugacaaaucaagagcauugcuuuuguuucuuaagaaaacaaacucuuuuuuaaaaauuacuuuuaaauauuaacucaaaaguugagauuuuggggugguggugugccaagacauuaauuuuuuuuuuaaacaaugaagugaaaaaguuuuacaaucucuagguuuggcuaguucucuuaacacugguuaaauuaacauugcauaaacacuuuucaagucugauccauauuuaauaaugcuuuaaaauaaaaauaaaaacaauccuuuugauaaauuuaaaauguuacuuauuuuaaaauaaaugaagugagauggcauggugaggugaaaguaucacuggacuaggaagaaggugacuuagguucuagauaggugucuuuuaggacucugauuuugaggacaucacuuacuauccauuucuucauguuaaaagaagucaucucaaacucuuaguuuuuuuuuuuuacaacuauguaauuuauauuccauuuacauaaggauacacuuauuugucaagcucagcacaaucuguaaauuuuuaaccuauguuacaccaucuucagugccagucuugggcaaaauugugcaagaggugaaguuuauauuugaauauccauucucguuuuaggacucuucuuccauauuagugucaucuugccucccuaccuuccacaugccccaugacuugaugcaguuuuaauacuuguaauuccccuaaccauaagauuuacugcugcuguggauaucuccaugaaguuuucccacugagucacaucagaaaugcccuacaucuuauuuccucagggcucaagagaaucugacagauaccauaaagggauuugaccuaaucacuaauuuucaggugguggcugaugcuuugaacaucucuuugcugcccaauccauuagcgacaguaggauuuuucaaaccugguaugaauagacagaacccuauccaguggaaggagaauuuaauaaagauagugcugaaagaauuccuuagguaaucuauaacuaggacuacuccugguaacaguaauacauuccauuguuuuaguaaccagaaaucuucaugcaaugaaaaauacuuuaauucaugaagcuuacuuuuuuuuuuuggugucagagucucgcucuugucacccaggcuggaaugcaguggcgccaucucagcucacugcaaccuccaucucccagguucaagcgauucucgugccucggccuccugaguagcugggauuacaggcgugugccacuacacucaacuaauuuuuguauuuuuaggagagacgggguuucacccuguuggccaggcuggucucgaacuccugaccucaagugauucacccaccuuggccucauaaaccuguuuugcagaacucauuuauucagcaaauauuuauugagugccuaccagaugccagucaccgcacaaggcacuggguauaugguauccccaaacaagagacauaaucccgguccuuagguagugcuaguguggucuguaauaucuuacuaaggccuuugguauacgacccagagauaacacgaugcguauuuuaguuuugcaaagaagggguuuggucucugugccagcucuauaauuguuuugcuacgauuccacugaaacucuucgaucaagcuacuuuauguaaaucacuucauuguuuuaaaggaauaaacuugauuauauuguuuuuuuauuuggcauaacugugauucuuuuaggacaauuacuguacacauuaagguguaugucagauauucauauugacccaaauguguaauauuccaguuuucucugcauaaguaauuaaaauauacuuaaaaauuaauaguuuuaucuggguacaaauaaacaggugccugaacuaguucacagacaaggaaacuucuauguaaaaaucacuaugauuucugaauugcuaugugaaacuacagaucuuuggaacacuguuuagguaggguguuaagacuuacacaguaccucguuucuacacagagaaagaaauggccauacuucaggaacugcagugcuuaugaggggauauuuaggccucuugaauuuuugauguagaugggcauuuuuuuaagguagugguuaauuaccuuuaugugaacuuugaaugguuuaacaaaagauuuguuuuuguagagauuuuaaagggggagaauucuagaaauaaauguuaccuaauuauuacagccuuaaagacaaaaauccuuguugaaguuuuuuuaaaaaaagcuaaauuacauagacuuaggcauuaacauguuuguggaagaauauagcagacguauauuguaucauuugagugaauguucccaaguaggcauucuaggcucuauuuaacugagucacacugcauaggaauuuagaaccuaacuuuuauagguuaucaaaacuguugucaccauugcacaauuuuguccuaauauauacauagaaacuuuguggggcauguuaaguuacaguuugcacaaguucaucucauuuguauuccauugauuuuuuuuuucuucuaaacauuuuuucuucaaacaguauauaacuuuuuuuaggggauuuuuuuuuagacagcaaaaacuaucugaagauuuccauuugucaaaaaguaaugauuucuugauaauuguguaguaauguuuuuuagaacccagcaguuaccuuaaagcugaauuuauauuuaguaacuucuguguuaauacuggauagcaugaauucugcauugagaaacugaauagcugucauaaaaugaaacuuucuuucuaaagaaagauacucacaugaguucuugaagaauagucauaacuagauuaagaucuguguuuuaguuuaauaguuugaagugccuguuugggauaaugauagguaauuuagaugaauuuaggggaaaaaaaaguuaucugcagauauguugagggcccaucucuccccccacacccccacagagcuaacuggguuacaguguuuuauccgaaaguuuccaauuccacugucuuguguuuucauguugaaaauacuuuugcauuuuuccuuugagugccaauuucuuacuaguacuauuucuuaauguaacauguuuaccuggaauguauuuuaacuauuuuuguauaguguaaacugaaacaugcacauuuuguacauugugcuuucuuuugugggacauaugcagugugauccaguuguuuuccaucauuugguugcgcugaccuaggaauguuggucauaucaaacauuaaaaaugaccacucuuuuaauugaaauuaacuuuuaaauguuuauaggaguaugugcugugaagugaucuaaaauuuguaauauuuuugucaugaacuguacuacuccuaauuauuguaauguaauaaaaauaguuacagugacaaaaaaaaaaaaaaa

SEQ ID NO: 1286 - RNA, 19 nt, Artificial Sequence
  Description of Artificial Sequence: Synthetic oligonucleotide
ggccgcggcggcggaggca

SEQ ID NO: 1287 - RNA, 19 nt, Artificial Sequence
  Description of Artificial Sequence: Synthetic oligonucleotide
agcagcggcggcggcagug

SEQ ID NO: 1288 - RNA, 19 nt, Artificial Sequence
  Description of Artificial Sequence: Synthetic oligonucleotide
ggcggcggcgaagguggcg

SEQ ID NO: 1289 - RNA, 19 nt, Artificial Sequence
  Description of Artificial Sequence: Synthetic oligonucleotide
ggcggcucggccaguacuc

SEQ ID NO: 1290 - RNA, 19 nt, Artificial Sequence
  Description of Artificial Sequence: Synthetic oligonucleotide
cccggcccccgccauuucg

SEQ ID NO: 1291 - RNA, 19 nt, Artificial Sequence
  Description of Artificial Sequence: Synthetic oligonucleotide
ggacugggagcgagcgcgg

SEQ ID NO: 1292 - RNA, 19 nt, Artificial Sequence
  Description of Artificial Sequence: Synthetic oligonucleotide
gcgcaggcacugaaggcgg

SEQ ID NO: 1293 - RNA, 19 nt, Artificial Sequence
  Description of Artificial Sequence: Synthetic oligonucleotide
gcggcggggccagaggcuc

SEQ ID NO: 1294 - RNA, 19 nt, Artificial Sequence
  Description of Artificial Sequence: Synthetic oligonucleotide
cagcggcucccaggugcgg

SEQ ID NO: 1295 - RNA, 19 nt, Artificial Sequence
  Description of Artificial Sequence: Synthetic oligonucleotide
ggagagaggccugcugaaa

SEQ ID NO: 1296 - RNA, 19 nt, Artificial Sequence
  Description of Artificial Sequence: Synthetic oligonucleotide
aaugacugaauauaaacuu

SEQ ID NO: 1297 - RNA, 19 nt, Artificial Sequence
  Description of Artificial Sequence: Synthetic oligonucleotide
ugugguaguuggagcuggu

SEQ ID NO: 1298 - RNA, 19 nt, Artificial Sequence
  Description of Artificial Sequence: Synthetic oligonucleotide
uggcguaggcaagagugcc

SEQ ID NO: 1299 - RNA, 19 nt, Artificial Sequence
  Description of Artificial Sequence: Synthetic oligonucleotide
cuugacgauacagcuaauu

SEQ ID NO: 1300 - RNA, 19 nt, Artificial Sequence
  Description of Artificial Sequence: Synthetic oligonucleotide
ucagaaucauuuuguggac

SEQ ID NO: 1301 - RNA, 19 nt, Artificial Sequence
  Description of Artificial Sequence: Synthetic oligonucleotide
cgaauaugauccaacaaua

SEQ ID NO: 1302 - RNA, 19 nt, Artificial Sequence
  Description of Artificial Sequence: Synthetic oligonucleotide
agaggauuccuacaggaag

SEQ ID NO: 1303 - RNA, 19 nt, Artificial Sequence
  Description of Artificial Sequence: Synthetic oligonucleotide
gcaaguaguaauugaugga

SEQ ID NO: 1304 - RNA, 19 nt, Artificial Sequence
  Description of Artificial Sequence: Synthetic oligonucleotide
agaaaccugucucuuggau

SEQ ID NO: 1305 - RNA, 19 nt, Artificial Sequence
  Description of Artificial Sequence: Synthetic oligonucleotide
uauucucgacacagcaggu

SEQ ID NO: 1306 - RNA, 19 nt, Artificial Sequence
  Description of Artificial Sequence: Synthetic oligonucleotide
ucaagaggaguacagugca

SEQ ID NO: 1307 - RNA, 19 nt, Artificial Sequence
  Description of Artificial Sequence: Synthetic oligonucleotide
aaugagggaccaguacaug

SEQ ID NO: 1308 - RNA, 19 nt, Artificial Sequence
  Description of Artificial Sequence: Synthetic oligonucleotide
gaggacuggggagggcuuu

SEQ ID NO: 1309 - RNA, 19 nt, Artificial Sequence
  Description of Artificial Sequence: Synthetic oligonucleotide
ucuuuguguauuugccaua

SEQ ID NO: 1310 - RNA, 19 nt, Artificial Sequence
  Description of Artificial Sequence: Synthetic oligonucleotide
aaauaauacuaaaucauuu

SEQ ID NO: 1311 - RNA, 19 nt, Artificial Sequence
  Description of Artificial Sequence: Synthetic oligonucleotide
ugaagauauucaccauuau

SEQ ID NO: 1312 - RNA, 19 nt, Artificial Sequence
  Description of Artificial Sequence: Synthetic oligonucleotide
uagagaacaaauuaaaaga

SEQ ID NO: 1313 - RNA, 19 nt, Artificial Sequence
  Description of Artificial Sequence: Synthetic oligonucleotide
aguuaaggacucugaagau

SEQ ID NO: 1314 - RNA, 19 nt, Artificial Sequence
  Description of Artificial Sequence: Synthetic oligonucleotide
uguaccuaugguccuagua

SEQ ID NO: 1315 - RNA, 19 nt, Artificial Sequence
  Description of Artificial Sequence: Synthetic oligonucleotide
aggaaauaaaugugauuug

SEQ ID NO: 1316 - RNA, 19 nt, Artificial Sequence
  Description of Artificial Sequence: Synthetic oligonucleotide
gccuucuagaacaguagac

SEQ ID NO: 1317 - RNA, 19 nt, Artificial Sequence
  Description of Artificial Sequence: Synthetic oligonucleotide
cacaaaacaggcucaggac

SEQ ID NO: 1318 - RNA, 19 nt, Artificial Sequence
  Description of Artificial Sequence: Synthetic oligonucleotide
cuuagcaagaaguuaugga

SEQ ID NO: 1319 - RNA, 19 nt, Artificial Sequence
  Description of Artificial Sequence: Synthetic oligonucleotide
aauuccuuuuauugaaaca

SEQ ID NO: 1320 - RNA, 19 nt, Artificial Sequence
  Description of Artificial Sequence: Synthetic oligonucleotide
aucagcaaagacaagacag

SEQ ID NO: 1321 - RNA, 19 nt, Artificial Sequence
  Description of Artificial Sequence: Synthetic oligonucleotide
gagaguggaggaugcuuuu

SEQ ID NO: 1322 - RNA, 19 nt, Artificial Sequence
  Description of Artificial Sequence: Synthetic oligonucleotide
uuauacauuggugagggag

SEQ ID NO: 1323 - RNA, 19 nt, Artificial Sequence
  Description of Artificial Sequence: Synthetic oligonucleotide
gauccgacaauacagauug

SEQ ID NO: 1324 - RNA, 19 nt, Artificial Sequence
  Description of Artificial Sequence: Synthetic oligonucleotide
gaaaaaaaucagcaaagaa

SEQ ID NO: 1325 - RNA, 19 nt, Artificial Sequence
  Description of Artificial Sequence: Synthetic oligonucleotide
agaaaagacuccuggcugu

SEQ ID NO: 1326 - RNA, 19 nt, Artificial Sequence
  Description of Artificial Sequence: Synthetic oligonucleotide
ugugaaaauuaaaaaaugc

SEQ ID NO: 1327 - RNA, 19 nt, Artificial Sequence
  Description of Artificial Sequence: Synthetic oligonucleotide
cauuauaauguaaucuggg

SEQ ID NO: 1328 - RNA, 19 nt, Artificial Sequence
  Description of Artificial Sequence: Synthetic oligonucleotide
guguugaugaugccuucua

SEQ ID NO: 1329 - RNA, 19 nt, Artificial Sequence
  Description of Artificial Sequence: Synthetic oligonucleotide
auacauuaguucgagaaau

SEQ ID NO: 1330 - RNA, 19 nt, Artificial Sequence
  Description of Artificial Sequence: Synthetic oligonucleotide
uucgaaaacauaaagaaaa

SEQ ID NO: 1331 - RNA, 19 nt, Artificial Sequence
  Description of Artificial Sequence: Synthetic oligonucleotide
agaugagcaaagaugguaa

SEQ ID NO: 1332 - RNA, 19 nt, Artificial Sequence
  Description of Artificial Sequence: Synthetic oligonucleotide
aaaagaagaaaaagaaguc

SEQ ID NO: 1333 - RNA, 19 nt, Artificial Sequence
  Description of Artificial Sequence: Synthetic oligonucleotide
caaagacaaaguguguaau

SEQ ID NO: 1334 - RNA, 19 nt, Artificial Sequence
  Description of Artificial Sequence: Synthetic oligonucleotide
uuauguaaauacaauuugu

SEQ ID NO: 1335 - RNA, 19 nt, Artificial Sequence
  Description of Artificial Sequence: Synthetic oligonucleotide
uacuuuuuucuuaaggcau

SEQ ID NO: 1336 - RNA, 19 nt, Artificial Sequence
  Description of Artificial Sequence: Synthetic oligonucleotide
uacuaguacaagugguaau

SEQ ID NO: 1337 - RNA, 19 nt, Artificial Sequence
  Description of Artificial Sequence: Synthetic oligonucleotide
uuuuuguacauuacacuaa

SEQ ID NO: 1338 - RNA, 19 nt, Artificial Sequence
  Description of Artificial Sequence: Synthetic oligonucleotide
aauuauuagcauuuguuuu

SEQ ID NO: 1339 - RNA, 19 nt, Artificial Sequence
  Description of Artificial Sequence: Synthetic oligonucleotide
uagcauuaccuaauuuuuu

SEQ ID NO: 1340 - RNA, 19 nt, Artificial Sequence
  Description of Artificial Sequence: Synthetic oligonucleotide
uuccugcuccaugcagacu

SEQ ID NO: 1341 - RNA, 19 nt, Artificial Sequence
  Description of Artificial Sequence: Synthetic oligonucleotide
uguuagcuuuuaccuuaaa

SEQ ID NO: 1342 - RNA, 19 nt, Artificial Sequence
  Description of Artificial Sequence: Synthetic oligonucleotide
augcuuauuuuaaaaugac

SEQ ID NO: 1343 - RNA, 19 nt, Artificial Sequence
  Description of Artificial Sequence: Synthetic oligonucleotide
caguggaaguuuuuuuuuc

SEQ ID NO: 1344 - RNA, 19 nt, Artificial Sequence
  Description of Artificial Sequence: Synthetic oligonucleotide
ccucuaagugccaguauuc

SEQ ID NO: 1345 - RNA, 19 nt, Artificial Sequence
  Description of Artificial Sequence: Synthetic oligonucleotide
cccagaguuuugguuuuug

SEQ ID NO: 1346 - RNA, 19 nt, Artificial Sequence
  Description of Artificial Sequence: Synthetic oligonucleotide
gaacuagcaaugccuguga

SEQ ID NO: 1347 - RNA, 19 nt, Artificial Sequence
  Description of Artificial Sequence: Synthetic oligonucleotide
aaaaagaaacugaauaccu

SEQ ID NO: 1348 - RNA, 19 nt, Artificial Sequence
  Description of Artificial Sequence: Synthetic oligonucleotide
uaagauuucugucuugggg

SEQ ID NO: 1349 - RNA, 19 nt, Artificial Sequence
  Description of Artificial Sequence: Synthetic oligonucleotide
guuuuuggugcaugcaguu

SEQ ID NO: 1350 - RNA, 19 nt, Artificial Sequence
  Description of Artificial Sequence: Synthetic oligonucleotide
ugauuacuucuuauuuuuc

SEQ ID NO: 1351 - RNA, 19 nt, Artificial Sequence
  Description of Artificial Sequence: Synthetic oligonucleotide
cuuaccaauugugaauguu

SEQ ID NO: 1352 - RNA, 19 nt, Artificial Sequence
  Description of Artificial Sequence: Synthetic oligonucleotide
uggugugaaacaaauuaau

SEQ ID NO: 1353 - RNA, 19 nt, Artificial Sequence
  Description of Artificial Sequence: Synthetic oligonucleotide
ugaagcuuuugaaucaucc

SEQ ID NO: 1354 - RNA, 19 nt, Artificial Sequence
  Description of Artificial Sequence: Synthetic oligonucleotide
ccuauucuguguuuuaucu

SEQ ID NO: 1355 - RNA, 19 nt, Artificial Sequence
  Description of Artificial Sequence: Synthetic oligonucleotide
uagucacauaaauggauua

SEQ ID NO: 1356 - RNA, 19 nt, Artificial Sequence
  Description of Artificial Sequence: Synthetic oligonucleotide
aauuacuaauuucaguuga

SEQ ID NO: 1357 - RNA, 19 nt, Artificial Sequence
  Description of Artificial Sequence: Synthetic oligonucleotide
agaccuucuaauugguuuu

SEQ ID NO: 1358 - RNA, 19 nt, Artificial Sequence
  Description of Artificial Sequence: Synthetic oligonucleotide
uuacugaaacauugaggga

SEQ ID NO: 1359 - RNA, 19 nt, Artificial Sequence
  Description of Artificial Sequence: Synthetic oligonucleotide
aacacaaauuuaugggcuu

SEQ ID NO: 1360 - RNA, 19 nt, Artificial Sequence
  Description of Artificial Sequence: Synthetic oligonucleotide
uccugaugaugauucuucu

SEQ ID NO: 1361 - RNA, 19 nt, Artificial Sequence
  Description of Artificial Sequence: Synthetic oligonucleotide
uaggcaucauguccuauag

SEQ ID NO: 1362 - RNA, 19 nt, Artificial Sequence
  Description of Artificial Sequence: Synthetic oligonucleotide
guuugucaucccugaugaa

SEQ ID NO: 1363 - RNA, 19 nt, Artificial Sequence
  Description of Artificial Sequence: Synthetic oligonucleotide
auguaaaguuacacuguuc

SEQ ID NO: 1364 - RNA, 19 nt, Artificial Sequence
  Description of Artificial Sequence: Synthetic oligonucleotide
cacaaagguuuugucuccu

SEQ ID NO: 1365 - RNA, 19 nt, Artificial Sequence
  Description of Artificial Sequence: Synthetic oligonucleotide
uuuccacugcuauuaguca

SEQ ID NO: 1366 - RNA, 19 nt, Artificial Sequence
  Description of Artificial Sequence: Synthetic oligonucleotide
auggucacucuccccaaaa

SEQ ID NO: 1367 - RNA, 19 nt, Artificial Sequence
  Description of Artificial Sequence: Synthetic oligonucleotide
auauuauauuuuuucuaua

SEQ ID NO: 1368 - RNA, 19 nt, Artificial Sequence
  Description of Artificial Sequence: Synthetic oligonucleotide
aaaaagaaaaaaauggaaa

SEQ ID NO: 1369 - RNA, 19 nt, Artificial Sequence
  Description of Artificial Sequence: Synthetic oligonucleotide
aaaaauuacaaggcaaugg

SEQ ID NO: 1370 - RNA, 19 nt, Artificial Sequence
  Description of Artificial Sequence: Synthetic oligonucleotide
gaaacuauuauaaggccau

SEQ ID NO: 1371 - RNA, 19 nt, Artificial Sequence
  Description of Artificial Sequence: Synthetic oligonucleotide
uuuccuuuucacauuagau

SEQ ID NO: 1372 - RNA, 19 nt, Artificial Sequence
  Description of Artificial Sequence: Synthetic oligonucleotide
uaaauuacuauaaagacuc

SEQ ID NO: 1373 - RNA, 19 nt, Artificial Sequence
  Description of Artificial Sequence: Synthetic oligonucleotide
ccuaauagcuuuuccuguu

SEQ ID NO: 1374 - RNA, 19 nt, Artificial Sequence
  Description of Artificial Sequence: Synthetic oligonucleotide
uaaggcagacccaguauga

SEQ ID NO: 1375 - RNA, 19 nt, Artificial Sequence
  Description of Artificial Sequence: Synthetic oligonucleotide
aaauggggauuauuauagc

SEQ ID NO: 1376 - RNA, 19 nt, Artificial Sequence
  Description of Artificial Sequence: Synthetic oligonucleotide
caaccauuuuggggcuaua

SEQ ID NO: 1377 - RNA, 19 nt, Artificial Sequence
  Description of Artificial Sequence: Synthetic oligonucleotide
auuuacaugcuacuaaauu

SEQ ID NO: 1378 - RNA, 19 nt, Artificial Sequence
  Description of Artificial Sequence: Synthetic oligonucleotide
uuuuauaauaauugaaaag

SEQ ID NO: 1379 - RNA, 19 nt, Artificial Sequence
  Description of Artificial Sequence: Synthetic oligonucleotide
gauuuuaacaaguauaaaa

SEQ ID NO: 1380 - RNA, 19 nt, Artificial Sequence
  Description of Artificial Sequence: Synthetic oligonucleotide
aaauucucauaggaauuaa

SEQ ID NO: 1381 - RNA, 19 nt, Artificial Sequence
  Description of Artificial Sequence: Synthetic oligonucleotide
aauguagucucccuguguc

SEQ ID NO: 1382 - RNA, 19 nt, Artificial Sequence
  Description of Artificial Sequence: Synthetic oligonucleotide
cagacugcucuuucauagu

SEQ ID NO: 1383 - RNA, 19 nt, Artificial Sequence
  Description of Artificial Sequence: Synthetic oligonucleotide
uauaacuuuaaaucuuuuc

SEQ ID NO: 1384 - RNA, 19 nt, Artificial Sequence
  Description of Artificial Sequence: Synthetic oligonucleotide
cuucaacuugagucuuuga

SEQ ID NO: 1385 - RNA, 19 nt, Artificial Sequence
  Description of Artificial Sequence: Synthetic oligonucleotide
aagauaguuuuaauucugc

SEQ ID NO: 1386 - RNA, 19 nt, Artificial Sequence
  Description of Artificial Sequence: Synthetic oligonucleotide
cuugugacauuaaaagauu

SEQ ID NO: 1387 - RNA, 19 nt, Artificial Sequence
  Description of Artificial Sequence: Synthetic oligonucleotide
uauuugggccaguuauagc

SEQ ID NO: 1388 - RNA, 19 nt, Artificial Sequence
  Description of Artificial Sequence: Synthetic oligonucleotide
cuuauuagguguugaagag

SEQ ID NO: 1389 - RNA, 19 nt, Artificial Sequence
  Description of Artificial Sequence: Synthetic oligonucleotide
gaccaagguugcaaggcca

SEQ ID NO: 1390 - RNA, 19 nt, Artificial Sequence
  Description of Artificial Sequence: Synthetic oligonucleotide
aggcccugugugaaccuuu

SEQ ID NO: 1391 - RNA, 19 nt, Artificial Sequence
  Description of Artificial Sequence: Synthetic oligonucleotide
ugagcuuucauagagaguu

SEQ ID NO: 1392 - RNA, 19 nt, Artificial Sequence
  Description of Artificial Sequence: Synthetic oligonucleotide
uucacagcauggacugugu

SEQ ID NO: 1393 - RNA, 19 nt, Artificial Sequence
  Description of Artificial Sequence: Synthetic oligonucleotide
uccccacggucauccagug

SEQ ID NO: 1394 - RNA, 19 nt, Artificial Sequence
  Description of Artificial Sequence: Synthetic oligonucleotide
guugucaugcauugguuag

SEQ ID NO: 1395 - RNA, 19 nt, Artificial Sequence
  Description of Artificial Sequence: Synthetic oligonucleotide
gucaaaauggggagggacu

SEQ ID NO: 1396 - RNA, 19 nt, Artificial Sequence
  Description of Artificial Sequence: Synthetic oligonucleotide
uagggcaguuuggauagcu

SEQ ID NO: 1397 - RNA, 19 nt, Artificial Sequence
  Description of Artificial Sequence: Synthetic oligonucleotide
ucaacaagauacaaucuca

SEQ ID NO: 1398 - RNA, 19 nt, Artificial Sequence
  Description of Artificial Sequence: Synthetic oligonucleotide
acucuguggugguccugcu

SEQ ID NO: 1399 - RNA, 19 nt, Artificial Sequence
  Description of Artificial Sequence: Synthetic oligonucleotide
ugacaaaucaagagcauug

SEQ ID NO: 1400 - RNA, 19 nt, Artificial Sequence
  Description of Artificial Sequence: Synthetic oligonucleotide
gcuuuuguuucuuaagaaa

SEQ ID NO: 1401 - RNA, 19 nt, Artificial Sequence
  Description of Artificial Sequence: Synthetic oligonucleotide
aacaaacucuuuuuuaaaa

SEQ ID NO: 1402 - RNA, 19 nt, Artificial Sequence
  Description of Artificial Sequence: Synthetic oligonucleotide
aauuacuuuuaaauauuaa

SEQ ID NO: 1403 - RNA, 19 nt, Artificial Sequence
  Description of Artificial Sequence: Synthetic oligonucleotide
acucaaaaguugagauuuu

SEQ ID NO: 1404 - RNA, 19 nt, Artificial Sequence
  Description of Artificial Sequence: Synthetic oligonucleotide
uggggugguggugugccaa

SEQ ID NO: 1405 - RNA, 19 nt, Artificial Sequence
  Description of Artificial Sequence: Synthetic oligonucleotide
uaaacaaugaagugaaaaa

SEQ ID NO: 1406 - RNA, 19 nt, Artificial Sequence
  Description of Artificial Sequence: Synthetic oligonucleotide
aguuuuacaaucucuaggu

SEQ ID NO: 1407 - RNA, 19 nt, Artificial Sequence
  Description of Artificial Sequence: Synthetic oligonucleotide
uuuggcuaguucucuuaac

SEQ ID NO: 1408 - RNA, 19 nt, Artificial Sequence
  Description of Artificial Sequence: Synthetic oligonucleotide
cacugguuaaauuaacauu

SEQ ID NO: 1409 - RNA, 19 nt, Artificial Sequence
  Description of Artificial Sequence: Synthetic oligonucleotide
ugcauaaacacuuuucaag

SEQ ID NO: 1410 - RNA, 19 nt, Artificial Sequence
  Description of Artificial Sequence: Synthetic oligonucleotide
gucugauccauauuuaaua

SEQ ID NO: 1411 - RNA, 19 nt, Artificial Sequence
  Description of Artificial Sequence: Synthetic oligonucleotide
aaugcuuuaaaauaaaaau

SEQ ID NO: 1412 - RNA, 19 nt, Artificial Sequence
  Description of Artificial Sequence: Synthetic oligonucleotide
uaaaaacaauccuuuugau

SEQ ID NO: 1413 - RNA, 19 nt, Artificial Sequence
  Description of Artificial Sequence: Synthetic oligonucleotide
uaaauuuaaaauguuacuu

SEQ ID NO: 1414 - RNA, 19 nt, Artificial Sequence
  Description of Artificial Sequence: Synthetic oligonucleotide
uauuuuaaaauaaaugaag

SEQ ID NO: 1415 - RNA, 19 nt, Artificial Sequence
  Description of Artificial Sequence: Synthetic oligonucleotide
gugagauggcauggugagg

SEQ ID NO: 1416 - RNA, 19 nt, Artificial Sequence
  Description of Artificial Sequence: Synthetic oligonucleotide
gugaaaguaucacuggacu

SEQ ID NO: 1417 - RNA, 19 nt, Artificial Sequence
  Description of Artificial Sequence: Synthetic oligonucleotide
uaggaagaaggugacuuag

SEQ ID NO: 1418 - RNA, 19 nt, Artificial Sequence
  Description of Artificial Sequence: Synthetic oligonucleotide
gguucuagauaggugucuu

SEQ ID NO: 1419 - RNA, 19 nt, Artificial Sequence
  Description of Artificial Sequence: Synthetic oligonucleotide
uuuaggacucugauuuuga

SEQ ID NO: 1420 - RNA, 19 nt, Artificial Sequence
  Description of Artificial Sequence: Synthetic oligonucleotide
aggacaucacuuacuaucc

SEQ ID NO: 1421 - RNA, 19 nt, Artificial Sequence
  Description of Artificial Sequence: Synthetic oligonucleotide
cauuucuucauguuaaaag

SEQ ID NO: 1422 - RNA, 19 nt, Artificial Sequence
  Description of Artificial Sequence: Synthetic oligonucleotide
gaagucaucucaaacucuu

SEQ ID NO: 1423 - RNA, 19 nt, Artificial Sequence
  Description of Artificial Sequence: Synthetic oligonucleotide
acuauguaauuuauauucc

SEQ ID NO: 1424 - RNA, 19 nt, Artificial Sequence
  Description of Artificial Sequence: Synthetic oligonucleotide
cauuuacauaaggauacac

SEQ ID NO: 1425 - RNA, 19 nt, Artificial Sequence
  Description of Artificial Sequence: Synthetic oligonucleotide
cuuauuugucaagcucagc

SEQ ID NO: 1426 - RNA, 19 nt, Artificial Sequence
  Description of Artificial Sequence: Synthetic oligonucleotide
cacaaucuguaaauuuuua

SEQ ID NO: 1427 - RNA, 19 nt, Artificial Sequence
  Description of Artificial Sequence: Synthetic oligonucleotide
aaccuauguuacaccaucu

SEQ ID NO: 1428 - RNA, 19 nt, Artificial Sequence
  Description of Artificial Sequence: Synthetic oligonucleotide
uucagugccagucuugggc

SEQ ID NO: 1429 - RNA, 19 nt, Artificial Sequence
  Description of Artificial Sequence: Synthetic oligonucleotide
caaaauugugcaagaggug

SEQ ID NO: 1430 - RNA, 19 nt, Artificial Sequence
  Description of Artificial Sequence: Synthetic oligonucleotide
gaaguuuauauuugaauau

SEQ ID NO: 1431 - RNA, 19 nt, Artificial Sequence
  Description of Artificial Sequence: Synthetic oligonucleotide
uccauucucguuuuaggac

SEQ ID NO: 1432 - RNA, 19 nt, Artificial Sequence
  Description of Artificial Sequence: Synthetic oligonucleotide
cucuucuuccauauuagug

SEQ ID NO: 1433 - RNA, 19 nt, Artificial Sequence
  Description of Artificial Sequence: Synthetic oligonucleotide
gucaucuugccucccuacc

SEQ ID NO: 1434 - RNA, 19 nt, Artificial Sequence
  Description of Artificial Sequence: Synthetic oligonucleotide
cuuccacaugccccaugac

SEQ ID NO: 1435 - RNA, 19 nt, Artificial Sequence
  Description of Artificial Sequence: Synthetic oligonucleotide
cuugaugcaguuuuaauac

SEQ ID NO: 1436 - RNA, 19 nt, Artificial Sequence
  Description of Artificial Sequence: Synthetic oligonucleotide
cuuguaauuccccuaacca

SEQ ID NO: 1437 - RNA, 19 nt, Artificial Sequence
  Description of Artificial Sequence: Synthetic oligonucleotide
auaagauuuacugcugcug

SEQ ID NO: 1438 - RNA, 19 nt, Artificial Sequence
  Description of Artificial Sequence: Synthetic oligonucleotide
guggauaucuccaugaagu

SEQ ID NO: 1439 - RNA, 19 nt, Artificial Sequence
  Description of Artificial Sequence: Synthetic oligonucleotide
uuuucccacugagucacau

SEQ ID NO: 1440 - RNA, 19 nt, Artificial Sequence
  Description of Artificial Sequence: Synthetic oligonucleotide
ucagaaaugcccuacaucu

SEQ ID NO: 1441 - RNA, 19 nt, Artificial Sequence
  Description of Artificial Sequence: Synthetic oligonucleotide
uuauuuccucagggcucaa

SEQ ID NO: 1442 - RNA, 19 nt, Artificial Sequence
  Description of Artificial Sequence: Synthetic oligonucleotide
agagaaucugacagauacc

SEQ ID NO: 1443 - RNA, 19 nt, Artificial Sequence
  Description of Artificial Sequence: Synthetic oligonucleotide
cauaaagggauuugaccua

SEQ ID NO: 1444 - RNA, 19 nt, Artificial Sequence
  Description of Artificial Sequence: Synthetic oligonucleotide
aaucacuaauuuucaggug

SEQ ID NO: 1445 - RNA, 19 nt, Artificial Sequence
  Description of Artificial Sequence: Synthetic oligonucleotide
gguggcugaugcuuugaac

SEQ ID NO: 1446 - RNA, 19 nt, Artificial Sequence
  Description of Artificial Sequence: Synthetic oligonucleotide
caucucuuugcugcccaau

SEQ ID NO: 1447 - RNA, 19 nt, Artificial Sequence
  Description of Artificial Sequence: Synthetic oligonucleotide
uccauuagcgacaguagga

SEQ ID NO: 1448 - RNA, 19 nt, Artificial Sequence
  Description of Artificial Sequence: Synthetic oligonucleotide
auuuuucaaaccugguaug

SEQ ID NO: 1449 - RNA, 19 nt, Artificial Sequence
  Description of Artificial Sequence: Synthetic oligonucleotide
gaauagacagaacccuauc

SEQ ID NO: 1450 - RNA, 19 nt, Artificial Sequence
  Description of Artificial Sequence: Synthetic oligonucleotide
ccaguggaaggagaauuua

SEQ ID NO: 1451 - RNA, 19 nt, Artificial Sequence
  Description of Artificial Sequence: Synthetic oligonucleotide
aauaaagauagugcugaaa

SEQ ID NO: 1452 - RNA, 19 nt, Artificial Sequence
  Description of Artificial Sequence: Synthetic oligonucleotide
agaauuccuuagguaaucu

SEQ ID NO: 1453 - RNA, 19 nt, Artificial Sequence
  Description of Artificial Sequence: Synthetic oligonucleotide
uauaacuaggacuacuccu

SEQ ID NO: 1454 - RNA, 19 nt, Artificial Sequence
  Description of Artificial Sequence: Synthetic oligonucleotide
ugguaacaguaauacauuc

SEQ ID NO: 1455 - RNA, 19 nt, Artificial Sequence
  Description of Artificial Sequence: Synthetic oligonucleotide
ccauuguuuuaguaaccag

SEQ ID NO: 1456 - RNA, 19 nt, Artificial Sequence
  Description of Artificial Sequence: Synthetic oligonucleotide
gaaaucuucaugcaaugaa

SEQ ID NO: 1457 - RNA, 19 nt, Artificial Sequence
  Description of Artificial Sequence: Synthetic oligonucleotide
aaaauacuuuaauucauga

SEQ ID NO: 1458 - RNA, 19 nt, Artificial Sequence
  Description of Artificial Sequence: Synthetic oligonucleotide
uggugucagagucucgcuc

SEQ ID NO: 1459 - RNA, 19 nt, Artificial Sequence
  Description of Artificial Sequence: Synthetic oligonucleotide
cuugucacccaggcuggaa

SEQ ID NO: 1460 - RNA, 19 nt, Artificial Sequence
  Description of Artificial Sequence: Synthetic oligonucleotide
augcaguggcgccaucuca

SEQ ID NO: 1461 - RNA, 19 nt, Artificial Sequence
  Description of Artificial Sequence: Synthetic oligonucleotide
agcucacugcaaccuccau

SEQ ID NO: 1462 - RNA, 19 nt, Artificial Sequence
  Description of Artificial Sequence: Synthetic oligonucleotide
ucucccagguucaagcgau

SEQ ID NO: 1463 - RNA, 19 nt, Artificial Sequence
  Description of Artificial Sequence: Synthetic oligonucleotide
uucucgugccucggccucc

SEQ ID NO: 1464 - RNA, 19 nt, Artificial Sequence
  Description of Artificial Sequence: Synthetic oligonucleotide
cugaguagcugggauuaca

SEQ ID NO: 1465 - RNA, 19 nt, Artificial Sequence
  Description of Artificial Sequence: Synthetic oligonucleotide
aggcgugugccacuacacu

SEQ ID NO: 1466 - RNA, 19 nt, Artificial Sequence
  Description of Artificial Sequence: Synthetic oligonucleotide
ucaacuaauuuuuguauuu

SEQ ID NO: 1467 - RNA, 19 nt, Artificial Sequence
  Description of Artificial Sequence: Synthetic oligonucleotide
uuuaggagagacgggguuu

SEQ ID NO: 1468 - RNA, 19 nt, Artificial Sequence
  Description of Artificial Sequence: Synthetic oligonucleotide
ucacccuguuggccaggcu

SEQ ID NO: 1469 - RNA, 19 nt, Artificial Sequence
  Description of Artificial Sequence: Synthetic oligonucleotide
uggucucgaacuccugacc

SEQ ID NO: 1470 - RNA, 19 nt, Artificial Sequence
  Description of Artificial Sequence: Synthetic oligonucleotide
cucaagugauucacccacc

SEQ ID NO: 1471 - RNA, 19 nt, Artificial Sequence
  Description of Artificial Sequence: Synthetic oligonucleotide
cuuggccucauaaaccugu

SEQ ID NO: 1472 - RNA, 19 nt, Artificial Sequence
  Description of Artificial Sequence: Synthetic oligonucleotide
uuuugcagaacucauuuau

SEQ ID NO: 1473 - RNA, 19 nt, Artificial Sequence
  Description of Artificial Sequence: Synthetic oligonucleotide
uucagcaaauauuuauuga

SEQ ID NO: 1474 - RNA, 19 nt, Artificial Sequence
  Description of Artificial Sequence: Synthetic oligonucleotide
agugccuaccagaugccag

SEQ ID NO: 1475 - RNA, 19 nt, Artificial Sequence
  Description of Artificial Sequence: Synthetic oligonucleotide
gucaccgcacaaggcacug

SEQ ID NO: 1476 - RNA, 19 nt, Artificial Sequence
  Description of Artificial Sequence: Synthetic oligonucleotide
ggguauaugguauccccaa

SEQ ID NO: 1477 - RNA, 19 nt, Artificial Sequence
  Description of Artificial Sequence: Synthetic oligonucleotide
aacaagagacauaaucccg

SEQ ID NO: 1478 - RNA, 19 nt, Artificial Sequence
  Description of Artificial Sequence: Synthetic oligonucleotide
gguccuuagguagugcuag

SEQ ID NO: 1479 - RNA, 19 nt, Artificial Sequence
  Description of Artificial Sequence: Synthetic oligonucleotide
guguggucuguaauaucuu

SEQ ID NO: 1480 - RNA, 19 nt, Artificial Sequence
  Description of Artificial Sequence: Synthetic oligonucleotide
uacuaaggccuuugguaua

SEQ ID NO: 1481 - RNA, 19 nt, Artificial Sequence
  Description of Artificial Sequence: Synthetic oligonucleotide
acgacccagagauaacacg

SEQ ID NO: 1482 - RNA, 19 nt, Artificial Sequence
  Description of Artificial Sequence: Synthetic oligonucleotide
gaugcguauuuuaguuuug

SEQ ID NO: 1483 - RNA, 19 nt, Artificial Sequence
  Description of Artificial Sequence: Synthetic oligonucleotide
gcaaagaagggguuugguc

SEQ ID NO: 1484 - RNA, 19 nt, Artificial Sequence
  Description of Artificial Sequence: Synthetic oligonucleotide
cucugugccagcucuauaa

SEQ ID NO: 1485 - RNA, 19 nt, Artificial Sequence
  Description of Artificial Sequence: Synthetic oligonucleotide
auuguuuugcuacgauucc

SEQ ID NO: 1486 - RNA, 19 nt, Artificial Sequence
  Description of Artificial Sequence: Synthetic oligonucleotide
cacugaaacucuucgauca

SEQ ID NO: 1487 - RNA, 19 nt, Artificial Sequence
  Description of Artificial Sequence: Synthetic oligonucleotide
aagcuacuuuauguaaauc

SEQ ID NO: 1488 - RNA, 19 nt, Artificial Sequence
  Description of Artificial Sequence: Synthetic oligonucleotide
cacuucauuguuuuaaagg

SEQ ID NO: 1489 - RNA, 19 nt, Artificial Sequence
  Description of Artificial Sequence: Synthetic oligonucleotide
gaauaaacuugauuauauu

SEQ ID NO: 1490 - RNA, 19 nt, Artificial Sequence
  Description of Artificial Sequence: Synthetic oligonucleotide
uguuuuuuuauuuggcaua

SEQ ID NO: 1491 - RNA, 19 nt, Artificial Sequence
  Description of Artificial Sequence: Synthetic oligonucleotide
aacugugauucuuuuagga

SEQ ID NO: 1492 - RNA, 19 nt, Artificial Sequence
  Description of Artificial Sequence: Synthetic oligonucleotide
acaauuacuguacacauua

SEQ ID NO: 1493 - RNA, 19 nt, Artificial Sequence
  Description of Artificial Sequence: Synthetic oligonucleotide
aagguguaugucagauauu

SEQ ID NO: 1494 - RNA, 19 nt, Artificial Sequence
  Description of Artificial Sequence: Synthetic oligonucleotide
ucauauugacccaaaugug

SEQ ID NO: 1495 - RNA, 19 nt, Artificial Sequence
  Description of Artificial Sequence: Synthetic oligonucleotide
guaauauuccaguuuucuc

SEQ ID NO: 1496 - RNA, 19 nt, Artificial Sequence
  Description of Artificial Sequence: Synthetic oligonucleotide
cugcauaaguaauuaaaau

SEQ ID NO: 1497 - RNA, 19 nt, Artificial Sequence
  Description of Artificial Sequence: Synthetic oligonucleotide
uauacuuaaaaauuaauag

SEQ ID NO: 1498 - RNA, 19 nt, Artificial Sequence
  Description of Artificial Sequence: Synthetic oligonucleotide
guuuuaucuggguacaaau

SEQ ID NO: 1499 - RNA, 19 nt, Artificial Sequence
  Description of Artificial Sequence: Synthetic oligonucleotide
uaaacaggugccugaacua

SEQ ID NO: 1500 - RNA, 19 nt, Artificial Sequence
  Description of Artificial Sequence: Synthetic oligonucleotide
aguucacagacaaggaaac

SEQ ID NO: 1501 - RNA, 19 nt, Artificial Sequence
  Description of Artificial Sequence: Synthetic oligonucleotide
cuucuauguaaaaaucacu

SEQ ID NO: 1502 - RNA, 19 nt, Artificial Sequence
  Description of Artificial Sequence: Synthetic oligonucleotide
uaugauuucugaauugcua

SEQ ID NO: 1503 - RNA, 19 nt, Artificial Sequence
  Description of Artificial Sequence: Synthetic oligonucleotide
augugaaacuacagaucuu

SEQ ID NO: 1504 - RNA, 19 nt, Artificial Sequence
  Description of Artificial Sequence: Synthetic oligonucleotide
uuggaacacuguuuaggua

SEQ ID NO: 1505 - RNA, 19 nt, Artificial Sequence
  Description of Artificial Sequence: Synthetic oligonucleotide
aggguguuaagacuuacac

SEQ ID NO: 1506 - RNA, 19 nt, Artificial Sequence
  Description of Artificial Sequence: Synthetic oligonucleotide
caguaccucguuucuacac

SEQ ID NO: 1507 - RNA, 19 nt, Artificial Sequence
  Description of Artificial Sequence: Synthetic oligonucleotide
cagagaaagaaauggccau

SEQ ID NO: 1508 - RNA, 19 nt, Artificial Sequence
  Description of Artificial Sequence: Synthetic oligonucleotide
uacuucaggaacugcagug

SEQ ID NO: 1509 - RNA, 19 nt, Artificial Sequence
  Description of Artificial Sequence: Synthetic oligonucleotide
gcuuaugaggggauauuua

SEQ ID NO: 1510 - RNA, 19 nt, Artificial Sequence
  Description of Artificial Sequence: Synthetic oligonucleotide
aggccucuugaauuuuuga

SEQ ID NO: 1511 - RNA, 19 nt, Artificial Sequence
  Description of Artificial Sequence: Synthetic oligonucleotide
auguagaugggcauuuuuu

SEQ ID NO: 1512 - RNA, 19 nt, Artificial Sequence
  Description of Artificial Sequence: Synthetic oligonucleotide
uuaagguagugguuaauua

SEQ ID NO: 1513 - RNA, 19 nt, Artificial Sequence
  Description of Artificial Sequence: Synthetic oligonucleotide
accuuuaugugaacuuuga

SEQ ID NO: 1514 - RNA, 19 nt, Artificial Sequence
  Description of Artificial Sequence: Synthetic oligonucleotide
aaugguuuaacaaaagauu

SEQ ID NO: 1515 - RNA, 19 nt, Artificial Sequence
  Description of Artificial Sequence: Synthetic oligonucleotide
uuguuuuuguagagauuuu

SEQ ID NO: 1516 - RNA, 19 nt, Artificial Sequence
  Description of Artificial Sequence: Synthetic oligonucleotide
uaaagggggagaauucuag

SEQ ID NO: 1517 - RNA, 19 nt, Artificial Sequence
  Description of Artificial Sequence: Synthetic oligonucleotide
gaaauaaauguuaccuaau

SEQ ID NO: 1518 - RNA, 19 nt, Artificial Sequence
  Description of Artificial Sequence: Synthetic oligonucleotide
uuauuacagccuuaaagac

SEQ ID NO: 1519 - RNA, 19 nt, Artificial Sequence
  Description of Artificial Sequence: Synthetic oligonucleotide
caaaaauccuuguugaagu

SEQ ID NO: 1520 - RNA, 19 nt, Artificial Sequence
  Description of Artificial Sequence: Synthetic oligonucleotide
uuuuuuuaaaaaaagcuaa

SEQ ID NO: 1521 - RNA, 19 nt, Artificial Sequence
  Description of Artificial Sequence: Synthetic oligonucleotide
aauuacauagacuuaggca

SEQ ID NO: 1522 - RNA, 19 nt, Artificial Sequence
  Description of Artificial Sequence: Synthetic oligonucleotide
auuaacauguuuguggaag

SEQ ID NO: 1523 - RNA, 19 nt, Artificial Sequence
  Description of Artificial Sequence: Synthetic oligonucleotide
gaauauagcagacguauau

SEQ ID NO: 1524 - RNA, 19 nt, Artificial Sequence
  Description of Artificial Sequence: Synthetic oligonucleotide
uuguaucauuugagugaau

SEQ ID NO: 1525 - RNA, 19 nt, Artificial Sequence
  Description of Artificial Sequence: Synthetic oligonucleotide
uguucccaaguaggcauuc

SEQ ID NO: 1526 - RNA, 19 nt, Artificial Sequence
  Description of Artificial Sequence: Synthetic oligonucleotide
cuaggcucuauuuaacuga

SEQ ID NO: 1527 - RNA, 19 nt, Artificial Sequence
  Description of Artificial Sequence: Synthetic oligonucleotide
agucacacugcauaggaau

SEQ ID NO: 1528 - RNA, 19 nt, Artificial Sequence
  Description of Artificial Sequence: Synthetic oligonucleotide
uuuagaaccuaacuuuuau

SEQ ID NO: 1529 - RNA, 19 nt, Artificial Sequence
  Description of Artificial Sequence: Synthetic oligonucleotide
uagguuaucaaaacuguug

SEQ ID NO: 1530 - RNA, 19 nt, Artificial Sequence
  Description of Artificial Sequence: Synthetic oligonucleotide
gucaccauugcacaauuuu

SEQ ID NO: 1531 - RNA, 19 nt, Artificial Sequence
  Description of Artificial Sequence: Synthetic oligonucleotide
uguccuaauauauacauag

SEQ ID NO: 1532 - RNA, 19 nt, Artificial Sequence
  Description of Artificial Sequence: Synthetic oligonucleotide
gaaacuuuguggggcaugu

SEQ ID NO: 1533 - RNA, 19 nt, Artificial Sequence
  Description of Artificial Sequence: Synthetic oligonucleotide
uuaaguuacaguuugcaca

SEQ ID NO: 1534 - RNA, 19 nt, Artificial Sequence
  Description of Artificial Sequence: Synthetic oligonucleotide
aaguucaucucauuuguau

SEQ ID NO: 1535 - RNA, 19 nt, Artificial Sequence
  Description of Artificial Sequence: Synthetic oligonucleotide
ucuucuaaacauuuuuucu

SEQ ID NO: 1536 - RNA, 19 nt, Artificial Sequence
  Description of Artificial Sequence: Synthetic oligonucleotide
uucaaacaguauauaacuu

SEQ ID NO: 1537 - RNA, 19 nt, Artificial Sequence
  Description of Artificial Sequence: Synthetic oligonucleotide
uuuuuuaggggauuuuuuu

SEQ ID NO: 1538 - RNA, 19 nt, Artificial Sequence
  Description of Artificial Sequence: Synthetic oligonucleotide
uuuagacagcaaaaacuau

SEQ ID NO: 1539 - RNA, 19 nt, Artificial Sequence
  Description of Artificial Sequence: Synthetic oligonucleotide
ucugaagauuuccauuugu

SEQ ID NO: 1540 - RNA, 19 nt, Artificial Sequence
  Description of Artificial Sequence: Synthetic oligonucleotide
ucaaaaaguaaugauuucu

SEQ ID NO: 1541 - RNA, 19 nt, Artificial Sequence
  Description of Artificial Sequence: Synthetic oligonucleotide
uugauaauuguguaguaau

SEQ ID NO: 1542 - RNA, 19 nt, Artificial Sequence
  Description of Artificial Sequence: Synthetic oligonucleotide
uguuuuuuagaacccagca

SEQ ID NO: 1543 - RNA, 19 nt, Artificial Sequence
  Description of Artificial Sequence: Synthetic oligonucleotide
aguuaccuuaaagcugaau

SEQ ID NO: 1544 - RNA, 19 nt, Artificial Sequence
  Description of Artificial Sequence: Synthetic oligonucleotide
uuuauauuuaguaacuucu

SEQ ID NO: 1545 - RNA, 19 nt, Artificial Sequence
  Description of Artificial Sequence: Synthetic oligonucleotide
uguguuaauacuggauagc

SEQ ID NO: 1546 - RNA, 19 nt, Artificial Sequence
  Description of Artificial Sequence: Synthetic oligonucleotide
caugaauucugcauugaga

SEQ ID NO: 1547 - RNA, 19 nt, Artificial Sequence
  Description of Artificial Sequence: Synthetic oligonucleotide
aaacugaauagcugucaua

SEQ ID NO: 1548 - RNA, 19 nt, Artificial Sequence
  Description of Artificial Sequence: Synthetic oligonucleotide
aaaaugaaacuuucuuucu

SEQ ID NO: 1549 - RNA, 19 nt, Artificial Sequence
  Description of Artificial Sequence: Synthetic oligonucleotide
uaaagaaagauacucacau

SEQ ID NO: 1550 - RNA, 19 nt, Artificial Sequence
  Description of Artificial Sequence: Synthetic oligonucleotide
ugaguucuugaagaauagu

SEQ ID NO: 1551 - RNA, 19 nt, Artificial Sequence
  Description of Artificial Sequence: Synthetic oligonucleotide
ucauaacuagauuaagauc

SEQ ID NO: 1552 - RNA, 19 nt, Artificial Sequence
  Description of Artificial Sequence: Synthetic oligonucleotide
cuguguuuuaguuuaauag

SEQ ID NO: 1553 - RNA, 19 nt, Artificial Sequence
  Description of Artificial Sequence: Synthetic oligonucleotide
guuugaagugccuguuugg

SEQ ID NO: 1554 - RNA, 19 nt, Artificial Sequence
  Description of Artificial Sequence: Synthetic oligonucleotide
ggauaaugauagguaauuu

SEQ ID NO: 1555 - RNA, 19 nt, Artificial Sequence
  Description of Artificial Sequence: Synthetic oligonucleotide
uagaugaauuuaggggaaa

SEQ ID NO: 1556 - RNA, 19 nt, Artificial Sequence
  Description of Artificial Sequence: Synthetic oligonucleotide
aaaaaaguuaucugcagau

SEQ ID NO: 1557 - RNA, 19 nt, Artificial Sequence
  Description of Artificial Sequence: Synthetic oligonucleotide
uauguugagggcccaucuc

SEQ ID NO: 1558 - RNA, 19 nt, Artificial Sequence
  Description of Artificial Sequence: Synthetic oligonucleotide
cuccccccacacccccaca

SEQ ID NO: 1559 - RNA, 19 nt, Artificial Sequence
  Description of Artificial Sequence: Synthetic oligonucleotide
agagcuaacuggguuacag

SEQ ID NO: 1560 - RNA, 19 nt, Artificial Sequence
  Description of Artificial Sequence: Synthetic oligonucleotide
guguuuuauccgaaaguuu

SEQ ID NO: 1561 - RNA, 19 nt, Artificial Sequence
  Description of Artificial Sequence: Synthetic oligonucleotide
uccaauuccacugucuugu

SEQ ID NO: 1562 - RNA, 19 nt, Artificial Sequence
  Description of Artificial Sequence: Synthetic oligonucleotide
uguuuucauguugaaaaua

SEQ ID NO: 1563 - RNA, 19 nt, Artificial Sequence
  Description of Artificial Sequence: Synthetic oligonucleotide
acuuuugcauuuuuccuuu

SEQ ID NO: 1564 - RNA, 19 nt, Artificial Sequence
  Description of Artificial Sequence: Synthetic oligonucleotide
ugagugccaauuucuuacu

SEQ ID NO: 1565 - RNA, 19 nt, Artificial Sequence
  Description of Artificial Sequence: Synthetic oligonucleotide
uaguacuauuucuuaaugu

SEQ ID NO: 1566 - RNA, 19 nt, Artificial Sequence
  Description of Artificial Sequence: Synthetic oligonucleotide
uaacauguuuaccuggaau

SEQ ID NO: 1567 - RNA, 19 nt, Artificial Sequence
  Description of Artificial Sequence: Synthetic oligonucleotide
uguauuuuaacuauuuuug

SEQ ID NO: 1568 - RNA, 19 nt, Artificial Sequence
  Description of Artificial Sequence: Synthetic oligonucleotide
guauaguguaaacugaaac

SEQ ID NO: 1569 - RNA, 19 nt, Artificial Sequence
  Description of Artificial Sequence: Synthetic oligonucleotide
caugcacauuuuguacauu

SEQ ID NO: 1570 - RNA, 19 nt, Artificial Sequence
  Description of Artificial Sequence: Synthetic oligonucleotide
ugugcuuucuuuuguggga

SEQ ID NO: 1571 - RNA, 19 nt, Artificial Sequence
  Description of Artificial Sequence: Synthetic oligonucleotide
acauaugcagugugaucca

SEQ ID NO: 1572 - RNA, 19 nt, Artificial Sequence
  Description of Artificial Sequence: Synthetic oligonucleotide
aguuguuuuccaucauuug

SEQ ID NO: 1573 - RNA, 19 nt, Artificial Sequence
  Description of Artificial Sequence: Synthetic oligonucleotide
gguugcgcugaccuaggaa

SEQ ID NO: 1574 - RNA, 19 nt, Artificial Sequence
  Description of Artificial Sequence: Synthetic oligonucleotide
auguuggucauaucaaaca

SEQ ID NO: 1575 - RNA, 19 nt, Artificial Sequence
  Description of Artificial Sequence: Synthetic oligonucleotide
auuaaaaaugaccacucuu

SEQ ID NO: 1576 - RNA, 19 nt, Artificial Sequence
  Description of Artificial Sequence: Synthetic oligonucleotide
uuuaauugaaauuaacuuu

SEQ ID NO: 1577 - RNA, 19 nt, Artificial Sequence
  Description of Artificial Sequence: Synthetic oligonucleotide
uuaaauguuuauaggagua

SEQ ID NO: 1578 - RNA, 19 nt, Artificial Sequence
  Description of Artificial Sequence: Synthetic oligonucleotide
augugcugugaagugaucu

SEQ ID NO: 1579 - RNA, 19 nt, Artificial Sequence
  Description of Artificial Sequence: Synthetic oligonucleotide
uaaaauuuguaauauuuuu

SEQ ID NO: 1580 - RNA, 19 nt, Artificial Sequence
  Description of Artificial Sequence: Synthetic oligonucleotide
ugucaugaacuguacuacu

SEQ ID NO: 1581 - RNA, 19 nt, Artificial Sequence
  Description of Artificial Sequence: Synthetic oligonucleotide
uccuaauuauuguaaugua

SEQ ID NO: 1582 - RNA, 19 nt, Artificial Sequence
  Description of Artificial Sequence: Synthetic oligonucleotide
aauaaaaauaguuacagug

SEQ ID NO: 1583 - RNA, 19 nt, Artificial Sequence
  Description of Artificial Sequence: Synthetic oligonucleotide
ggguguugaugaugccuuc

SEQ ID NO: 1584 - RNA, 19 nt, Artificial Sequence
  Description of Artificial Sequence: Synthetic oligonucleotide
cuauacauuaguucgagaa

SEQ ID NO: 1585 - RNA, 19 nt, Artificial Sequence
  Description of Artificial Sequence: Synthetic oligonucleotide
aauucgaaaacauaaagaa

SEQ ID NO: 1586 - RNA, 19 nt, Artificial Sequence
  Description of Artificial Sequence: Synthetic oligonucleotide
aaagaugagcaaagauggu

SEQ ID NO: 1587 - RNA, 19 nt, Artificial Sequence
  Description of Artificial Sequence: Synthetic oligonucleotide
uaaaaagaagaaaaagaag

SEQ ID NO: 1588 - RNA, 19 nt, Artificial Sequence
  Description of Artificial Sequence: Synthetic oligonucleotide
gucaaagacaaagugugua

SEQ ID NO: 1589 - RNA, 19 nt, Artificial Sequence
  Description of Artificial Sequence: Synthetic oligonucleotide
aauuauguaaauacaauuu

SEQ ID NO: 1590 - RNA, 19 nt, Artificial Sequence
  Description of Artificial Sequence: Synthetic oligonucleotide
uguacuuuuuucuuaaggc

SEQ ID NO: 1591 - RNA, 19 nt, Artificial Sequence
  Description of Artificial Sequence: Synthetic oligonucleotide
cauacuaguacaaguggua

SEQ ID NO: 1592 - RNA, 19 nt, Artificial Sequence
  Description of Artificial Sequence: Synthetic oligonucleotide
aauuuuuguacauuacacu

SEQ ID NO: 1593 - RNA, 19 nt, Artificial Sequence
  Description of Artificial Sequence: Synthetic oligonucleotide
uaaauuauuagcauuuguu

SEQ ID NO: 1594 - RNA, 19 nt, Artificial Sequence
  Description of Artificial Sequence: Synthetic oligonucleotide
uuuagcauuaccuaauuuu

SEQ ID NO: 1595 - RNA, 19 nt, Artificial Sequence
  Description of Artificial Sequence: Synthetic oligonucleotide
uuuuccugcuccaugcaga

SEQ ID NO: 1596 - RNA, 19 nt, Artificial Sequence
  Description of Artificial Sequence: Synthetic oligonucleotide
acuguuagcuuuuaccuua

SEQ ID NO: 1597 - RNA, 19 nt, Artificial Sequence
  Description of Artificial Sequence: Synthetic oligonucleotide
aaaugcuuauuuuaaaaug

SEQ ID NO: 1598 - RNA, 19 nt, Artificial Sequence
  Description of Artificial Sequence: Synthetic oligonucleotide
gacaguggaaguuuuuuuu

SEQ ID NO: 1599 - RNA, 19 nt, Artificial Sequence
  Description of Artificial Sequence: Synthetic oligonucleotide
uuccucuaagugccaguau

SEQ ID NO: 1600 - RNA, 19 nt, Artificial Sequence
  Description of Artificial Sequence: Synthetic oligonucleotide
uucccagaguuuugguuuu

SEQ ID NO: 1601 - RNA, 19 nt, Artificial Sequence
  Description of Artificial Sequence: Synthetic oligonucleotide
uugaacuagcaaugccugu

SEQ ID NO: 1602 - RNA, 19 nt, Artificial Sequence
  Description of Artificial Sequence: Synthetic oligonucleotide
ugaaaaagaaacugaauac

SEQ ID NO: 1603 - RNA, 19 nt, Artificial Sequence
  Description of Artificial Sequence: Synthetic oligonucleotide
ccuaagauuucugucuugg

SEQ ID NO: 1604 - RNA, 19 nt, Artificial Sequence
  Description of Artificial Sequence: Synthetic oligonucleotide
ggguuuuuggugcaugcag

SEQ ID NO: 1605 - RNA, 19 nt, Artificial Sequence
  Description of Artificial Sequence: Synthetic oligonucleotide
guugauuacuucuuauuuu

SEQ ID NO: 1606 - RNA, 19 nt, Artificial Sequence
  Description of Artificial Sequence: Synthetic oligonucleotide
uucuuaccaauugugaaug

SEQ ID NO: 1607 - RNA, 19 nt, Artificial Sequence
  Description of Artificial Sequence: Synthetic oligonucleotide
guuggugugaaacaaauua

SEQ ID NO: 1608 - RNA, 19 nt, Artificial Sequence
  Description of Artificial Sequence: Synthetic oligonucleotide
aaugaagcuuuugaaucau

SEQ ID NO: 1609 - RNA, 19 nt, Artificial Sequence
  Description of Artificial Sequence: Synthetic oligonucleotide
ucccuauucuguguuuuau

SEQ ID NO: 1610 - RNA, 19 nt, Artificial Sequence
  Description of Artificial Sequence: Synthetic oligonucleotide
ucuagucacauaaauggau

SEQ ID NO: 1611 - RNA, 19 nt, Artificial Sequence
  Description of Artificial Sequence: Synthetic oligonucleotide
uuaauuacuaauuucaguu

SEQ ID NO: 1612 - RNA, 19 nt, Artificial Sequence
  Description of Artificial Sequence: Synthetic oligonucleotide
ugagaccuucuaauugguu

SEQ ID NO: 1613 - RNA, 19 nt, Artificial Sequence
  Description of Artificial Sequence: Synthetic oligonucleotide
uuuuacugaaacauugagg

SEQ ID NO: 1614 - RNA, 19 nt, Artificial Sequence
  Description of Artificial Sequence: Synthetic oligonucleotide
ggaacacaaauuuaugggc

SEQ ID NO: 1615 - RNA, 19 nt, Artificial Sequence
  Description of Artificial Sequence: Synthetic oligonucleotide
cuuccugaugaugauucuu

SEQ ID NO: 1616 - RNA, 19 nt, Artificial Sequence
  Description of Artificial Sequence: Synthetic oligonucleotide
ucuaggcaucauguccuau

SEQ ID NO: 1617 - RNA, 19 nt, Artificial Sequence
  Description of Artificial Sequence: Synthetic oligonucleotide
uaguuugucaucccugaug

SEQ ID NO: 1618 - RNA, 19 nt, Artificial Sequence
  Description of Artificial Sequence: Synthetic oligonucleotide
gaauguaaaguuacacugu

SEQ ID NO: 1619 - RNA, 19 nt, Artificial Sequence
  Description of Artificial Sequence: Synthetic oligonucleotide
uucacaaagguuuugucuc

SEQ ID NO: 1620 - RNA, 19 nt, Artificial Sequence
  Description of Artificial Sequence: Synthetic oligonucleotide
ccuuuccacugcuauuagu

SEQ ID NO: 1621 - RNA, 19 nt, Artificial Sequence
  Description of Artificial Sequence: Synthetic oligonucleotide
ucauggucacucuccccaa

SEQ ID NO: 1622 - RNA, 19 nt, Artificial Sequence
  Description of Artificial Sequence: Synthetic oligonucleotide
aaauauuauauuuuuucua

SEQ ID NO: 1623 - RNA, 19 nt, Artificial Sequence
  Description of Artificial Sequence: Synthetic oligonucleotide
auaaaaagaaaaaaaugga

SEQ ID NO: 1624 - RNA, 19 nt, Artificial Sequence
  Description of Artificial Sequence: Synthetic oligonucleotide
aaaaaaauuacaaggcaau

SEQ ID NO: 1625 - RNA, 19 nt, Artificial Sequence
  Description of Artificial Sequence: Synthetic oligonucleotide
uggaaacuauuauaaggcc

SEQ ID NO: 1626 - RNA, 19 nt, Artificial Sequence
  Description of Artificial Sequence: Synthetic oligonucleotide
cauuuccuuuucacauuag

SEQ ID NO: 1627 - RNA, 19 nt, Artificial Sequence
  Description of Artificial Sequence: Synthetic oligonucleotide
gauaaauuacuauaaagac

SEQ ID NO: 1628 - RNA, 19 nt, Artificial Sequence
  Description of Artificial Sequence: Synthetic oligonucleotide
cuccuaauagcuuuuccug

SEQ ID NO: 1629 - RNA, 19 nt, Artificial Sequence
  Description of Artificial Sequence: Synthetic oligonucleotide
guuaaggcagacccaguau

SEQ ID NO: 1630 - RNA, 19 nt, Artificial Sequence
  Description of Artificial Sequence: Synthetic oligonucleotide
ugaaauggggauuauuaua

SEQ ID NO: 1631 - RNA, 19 nt, Artificial Sequence
  Description of Artificial Sequence: Synthetic oligonucleotide
agcaaccauuuuggggcua

SEQ ID NO: 1632 - RNA, 19 nt, Artificial Sequence
  Description of Artificial Sequence: Synthetic oligonucleotide
auauuuacaugcuacuaaa

SEQ ID NO: 1633 - RNA, 19 nt, Artificial Sequence
  Description of Artificial Sequence: Synthetic oligonucleotide
auuuuuauaauaauugaaa

SEQ ID NO: 1634 - RNA, 19 nt, Artificial Sequence
  Description of Artificial Sequence: Synthetic oligonucleotide
aagauuuuaacaaguauaa

SEQ ID NO: 1635 - RNA, 19 nt, Artificial Sequence
  Description of Artificial Sequence: Synthetic oligonucleotide
aaaaauucucauaggaauu

SEQ ID NO: 1636 - RNA, 19 nt, Artificial Sequence
  Description of Artificial Sequence: Synthetic oligonucleotide
uaaauguagucucccugug

SEQ ID NO: 1637 - RNA, 19 nt, Artificial Sequence
  Description of Artificial Sequence: Synthetic oligonucleotide
gucagacugcucuuucaua

SEQ ID NO: 1638 - RNA, 19 nt, Artificial Sequence
  Description of Artificial Sequence: Synthetic oligonucleotide
aguauaacuuuaaaucuuu

SEQ ID NO: 1639 - RNA, 19 nt, Artificial Sequence
  Description of Artificial Sequence: Synthetic oligonucleotide
uucuucaacuugagucuuu

SEQ ID NO: 1640 - RNA, 19 nt, Artificial Sequence
  Description of Artificial Sequence: Synthetic oligonucleotide
ugaagauaguuuuaauucu

SEQ ID NO: 1641 - RNA, 19 nt, Artificial Sequence
  Description of Artificial Sequence: Synthetic oligonucleotide
ugcuugugacauuaaaaga

SEQ ID NO: 1642 - RNA, 19 nt, Artificial Sequence
  Description of Artificial Sequence: Synthetic oligonucleotide
auuauuugggccaguuaua

SEQ ID NO: 1643 - RNA, 19 nt, Artificial Sequence
  Description of Artificial Sequence: Synthetic oligonucleotide
agcuuauuagguguugaag

SEQ ID NO: 1644 - RNA, 19 nt, Artificial Sequence
  Description of Artificial Sequence: Synthetic oligonucleotide
gagaccaagguugcaaggc

SEQ ID NO: 1645 - RNA, 19 nt, Artificial Sequence
  Description of Artificial Sequence: Synthetic oligonucleotide
ccaggcccugugugaaccu

SEQ ID NO: 1646 - RNA, 19 nt, Artificial Sequence
  Description of Artificial Sequence: Synthetic oligonucleotide
uuugagcuuucauagagag

SEQ ID NO: 1647 - RNA, 19 nt, Artificial Sequence
  Description of Artificial Sequence: Synthetic oligonucleotide
guuucacagcauggacugu

SEQ ID NO: 1648 - RNA, 19 nt, Artificial Sequence
  Description of Artificial Sequence: Synthetic oligonucleotide
uguccccacggucauccag

SEQ ID NO: 1649 - RNA, 19 nt, Artificial Sequence
  Description of Artificial Sequence: Synthetic oligonucleotide
guguugucaugcauugguu

SEQ ID NO: 1650 - RNA, 19 nt, Artificial Sequence
  Description of Artificial Sequence: Synthetic oligonucleotide
uagucaaaauggggaggga

SEQ ID NO: 1651 - RNA, 19 nt, Artificial Sequence
  Description of Artificial Sequence: Synthetic oligonucleotide
acuagggcaguuuggauag

SEQ ID NO: 1652 - RNA, 19 nt, Artificial Sequence
  Description of Artificial Sequence: Synthetic oligonucleotide
gcucaacaagauacaaucu

SEQ ID NO: 1653 - RNA, 19 nt, Artificial Sequence
  Description of Artificial Sequence: Synthetic oligonucleotide
ucacucuguggugguccug

SEQ ID NO: 1654 - RNA, 19 nt, Artificial Sequence
  Description of Artificial Sequence: Synthetic oligonucleotide
gcugacaaaucaagagcau

SEQ ID NO: 1655 - RNA, 19 nt, Artificial Sequence
  Description of Artificial Sequence: Synthetic oligonucleotide
uugcuuuuguuucuuaaga

SEQ ID NO: 1656 - RNA, 19 nt, Artificial Sequence
  Description of Artificial Sequence: Synthetic oligonucleotide
aaaacaaacucuuuuuuaa

SEQ ID NO: 1657 - RNA, 19 nt, Artificial Sequence
  Description of Artificial Sequence: Synthetic oligonucleotide
aaaauuacuuuuaaauauu

SEQ ID NO: 1658 - RNA, 19 nt, Artificial Sequence
  Description of Artificial Sequence: Synthetic oligonucleotide
uaacucaaaaguugagauu

SEQ ID NO: 1659 - RNA, 19 nt, Artificial Sequence
  Description of Artificial Sequence: Synthetic oligonucleotide
uuuggggugguggugugcc

SEQ ID NO: 1660 - RNA, 19 nt, Artificial Sequence
  Description of Artificial Sequence: Synthetic oligonucleotide
caagacauuaauuuuuuuu

SEQ ID NO: 1661 - RNA, 19 nt, Artificial Sequence
  Description of Artificial Sequence: Synthetic oligonucleotide
uuuaaacaaugaagugaaa

SEQ ID NO: 1662 - RNA, 19 nt, Artificial Sequence
  Description of Artificial Sequence: Synthetic oligonucleotide
aaaguuuuacaaucucuag

SEQ ID NO: 1663 - RNA, 19 nt, Artificial Sequence
  Description of Artificial Sequence: Synthetic oligonucleotide
gguuuggcuaguucucuua

SEQ ID NO: 1664 - RNA, 19 nt, Artificial Sequence
  Description of Artificial Sequence: Synthetic oligonucleotide
aacacugguuaaauuaaca

SEQ ID NO: 1665 - RNA, 19 nt, Artificial Sequence
  Description of Artificial Sequence: Synthetic oligonucleotide
auugcauaaacacuuuuca

SEQ ID NO: 1666 - RNA, 19 nt, Artificial Sequence
  Description of Artificial Sequence: Synthetic oligonucleotide
aagucugauccauauuuaa

SEQ ID NO: 1667 - RNA, 19 nt, Artificial Sequence
  Description of Artificial Sequence: Synthetic oligonucleotide
auaaugcuuuaaaauaaaa

SEQ ID NO: 1668 - RNA, 19 nt, Artificial Sequence
  Description of Artificial Sequence: Synthetic oligonucleotide
aauaaaaacaauccuuuug

SEQ ID NO: 1669 - RNA, 19 nt, Artificial Sequence
  Description of Artificial Sequence: Synthetic oligonucleotide
gauaaauuuaaaauguuac

SEQ ID NO: 1670 - RNA, 19 nt, Artificial Sequence
  Description of Artificial Sequence: Synthetic oligonucleotide
cuuauuuuaaaauaaauga

SEQ ID NO: 1671 - RNA, 19 nt, Artificial Sequence
  Description of Artificial Sequence: Synthetic oligonucleotide
aagugagauggcaugguga

SEQ ID NO: 1672 - RNA, 19 nt, Artificial Sequence
  Description of Artificial Sequence: Synthetic oligonucleotide
aggugaaaguaucacugga

SEQ ID NO: 1673 - RNA, 19 nt, Artificial Sequence
  Description of Artificial Sequence: Synthetic oligonucleotide
acuaggaagaaggugacuu

SEQ ID NO: 1674 - RNA, 19 nt, Artificial Sequence
  Description of Artificial Sequence: Synthetic oligonucleotide
uagguucuagauagguguc

SEQ ID NO: 1675 - RNA, 19 nt, Artificial Sequence
  Description of Artificial Sequence: Synthetic oligonucleotide
cuuuuaggacucugauuuu

SEQ ID NO: 1676 - RNA, 19 nt, Artificial Sequence
  Description of Artificial Sequence: Synthetic oligonucleotide
ugaggacaucacuuacuau

SEQ ID NO: 1677 - RNA, 19 nt, Artificial Sequence
  Description of Artificial Sequence: Synthetic oligonucleotide
uccauuucuucauguuaaa

SEQ ID NO: 1678 - RNA, 19 nt, Artificial Sequence
  Description of Artificial Sequence: Synthetic oligonucleotide
aagaagucaucucaaacuc

SEQ ID NO: 1679 - RNA, 19 nt, Artificial Sequence
  Description of Artificial Sequence: Synthetic oligonucleotide
caacuauguaauuuauauu

SEQ ID NO: 1680 - RNA, 19 nt, Artificial Sequence
  Description of Artificial Sequence: Synthetic oligonucleotide
uccauuuacauaaggauac

SEQ ID NO: 1681 - RNA, 19 nt, Artificial Sequence
  Description of Artificial Sequence: Synthetic oligonucleotide
cacuuauuugucaagcuca

SEQ ID NO: 1682 - RNA, 19 nt, Artificial Sequence
  Description of Artificial Sequence: Synthetic oligonucleotide
agcacaaucuguaaauuuu

SEQ ID NO: 1683 - RNA, 19 nt, Artificial Sequence
  Description of Artificial Sequence: Synthetic oligonucleotide
uuaaccuauguuacaccau

SEQ ID NO: 1684 - RNA, 19 nt, Artificial Sequence
  Description of Artificial Sequence: Synthetic oligonucleotide
ucuucagugccagucuugg

SEQ ID NO: 1685 - RNA, 19 nt, Artificial Sequence
  Description of Artificial Sequence: Synthetic oligonucleotide
ggcaaaauugugcaagagg

SEQ ID NO: 1686 - RNA, 19 nt, Artificial Sequence
  Description of Artificial Sequence: Synthetic oligonucleotide
gugaaguuuauauuugaau

SEQ ID NO: 1687 - RNA, 19 nt, Artificial Sequence
  Description of Artificial Sequence: Synthetic oligonucleotide
uauccauucucguuuuagg

SEQ ID NO: 1688 - RNA, 19 nt, Artificial Sequence
  Description of Artificial Sequence: Synthetic oligonucleotide
gacucuucuuccauauuag

SEQ ID NO: 1689 - RNA, 19 nt, Artificial Sequence
  Description of Artificial Sequence: Synthetic oligonucleotide
gugucaucuugccucccua

SEQ ID NO: 1690 - RNA, 19 nt, Artificial Sequence
  Description of Artificial Sequence: Synthetic oligonucleotide
accuuccacaugccccaug

SEQ ID NO: 1691 - RNA, 19 nt, Artificial Sequence
  Description of Artificial Sequence: Synthetic oligonucleotide
gacuugaugcaguuuuaau

SEQ ID NO: 1692 - RNA, 19 nt, Artificial Sequence
  Description of Artificial Sequence: Synthetic oligonucleotide
uacuuguaauuccccuaac

SEQ ID NO: 1693 - RNA, 19 nt, Artificial Sequence
  Description of Artificial Sequence: Synthetic oligonucleotide
ccauaagauuuacugcugc

SEQ ID NO: 1694 - RNA, 19 nt, Artificial Sequence
  Description of Artificial Sequence: Synthetic oligonucleotide
cuguggauaucuccaugaa

SEQ ID NO: 1695 - RNA, 19 nt, Artificial Sequence
  Description of Artificial Sequence: Synthetic oligonucleotide
aguuuucccacugagucac

SEQ ID NO: 1696 - RNA, 19 nt, Artificial Sequence
  Description of Artificial Sequence: Synthetic oligonucleotide
caucagaaaugcccuacau

SEQ ID NO: 1697 - RNA, 19 nt, Artificial Sequence
  Description of Artificial Sequence: Synthetic oligonucleotide
ucuuauuuccucagggcuc

SEQ ID NO: 1698 - RNA, 19 nt, Artificial Sequence
  Description of Artificial Sequence: Synthetic oligonucleotide
caagagaaucugacagaua

SEQ ID NO: 1699 - RNA, 19 nt, Artificial Sequence
  Description of Artificial Sequence: Synthetic oligonucleotide
accauaaagggauuugacc

SEQ ID NO: 1700 - RNA, 19 nt, Artificial Sequence
  Description of Artificial Sequence: Synthetic oligonucleotide
cuaaucacuaauuuucagg

SEQ ID NO: 1701 - RNA, 19 nt, Artificial Sequence
  Description of Artificial Sequence: Synthetic oligonucleotide
gugguggcugaugcuuuga

SEQ ID NO: 1702 - RNA, 19 nt, Artificial Sequence
  Description of Artificial Sequence: Synthetic oligonucleotide
aacaucucuuugcugccca

SEQ ID NO: 1703 - RNA, 19 nt, Artificial Sequence
  Description of Artificial Sequence: Synthetic oligonucleotide
aauccauuagcgacaguag

SEQ ID NO: 1704 - RNA, 19 nt, Artificial Sequence
  Description of Artificial Sequence: Synthetic oligonucleotide
ggauuuuucaaaccuggua

SEQ ID NO: 1705 - RNA, 19 nt, Artificial Sequence
  Description of Artificial Sequence: Synthetic oligonucleotide
augaauagacagaacccua

SEQ ID NO: 1706 - RNA, 19 nt, Artificial Sequence
  Description of Artificial Sequence: Synthetic oligonucleotide
auccaguggaaggagaauu

SEQ ID NO: 1707 - RNA, 19 nt, Artificial Sequence
  Description of Artificial Sequence: Synthetic oligonucleotide
uuaauaaagauagugcuga

SEQ ID NO: 1708 - RNA, 19 nt, Artificial Sequence
  Description of Artificial Sequence: Synthetic oligonucleotide
aaagaauuccuuagguaau

SEQ ID NO: 1709 - RNA, 19 nt, Artificial Sequence
  Description of Artificial Sequence: Synthetic oligonucleotide
ucuauaacuaggacuacuc

SEQ ID NO: 1710 - RNA, 19 nt, Artificial Sequence
  Description of Artificial Sequence: Synthetic oligonucleotide
ccugguaacaguaauacau

SEQ ID NO: 1711 - RNA, 19 nt, Artificial Sequence
  Description of Artificial Sequence: Synthetic oligonucleotide
uuccauuguuuuaguaacc

SEQ ID NO: 1712 - RNA, 19 nt, Artificial Sequence
  Description of Artificial Sequence: Synthetic oligonucleotide
cagaaaucuucaugcaaug

SEQ ID NO: 1713 - RNA, 19 nt, Artificial Sequence
  Description of Artificial Sequence: Synthetic oligonucleotide
gaaaaauacuuuaauucau

SEQ ID NO: 1714 - RNA, 19 nt, Artificial Sequence
  Description of Artificial Sequence: Synthetic oligonucleotide
ugaagcuuacuuuuuuuuu

SEQ ID NO: 1715 - RNA, 19 nt, Artificial Sequence
  Description of Artificial Sequence: Synthetic oligonucleotide
uuuggugucagagucucgc

SEQ ID NO: 1716 - RNA, 19 nt, Artificial Sequence
  Description of Artificial Sequence: Synthetic oligonucleotide
cucuugucacccaggcugg

SEQ ID NO: 1717 - RNA, 19 nt, Artificial Sequence
  Description of Artificial Sequence: Synthetic oligonucleotide
gaaugcaguggcgccaucu

SEQ ID NO: 1718 - RNA, 19 nt, Artificial Sequence
  Description of Artificial Sequence: Synthetic oligonucleotide
ucagcucacugcaaccucc

SEQ ID NO: 1719 - RNA, 19 nt, Artificial Sequence
  Description of Artificial Sequence: Synthetic oligonucleotide
caucucccagguucaagcg

SEQ ID NO: 1720 - RNA, 19 nt, Artificial Sequence
  Description of Artificial Sequence: Synthetic oligonucleotide
gauucucgugccucggccu

SEQ ID NO: 1721 - RNA, 19 nt, Artificial Sequence
  Description of Artificial Sequence: Synthetic oligonucleotide
uccugaguagcugggauua

SEQ ID NO: 1722 - RNA, 19 nt, Artificial Sequence
  Description of Artificial Sequence: Synthetic oligonucleotide
acaggcgugugccacuaca

SEQ ID NO: 1723 - RNA, 19 nt, Artificial Sequence
  Description of Artificial Sequence: Synthetic oligonucleotide
acucaacuaauuuuuguau

SEQ ID NO: 1724 - RNA, 19 nt, Artificial Sequence
  Description of Artificial Sequence: Synthetic oligonucleotide
uuuuuaggagagacggggu

SEQ ID NO: 1725 - RNA, 19 nt, Artificial Sequence
  Description of Artificial Sequence: Synthetic oligonucleotide
uuucacccuguuggccagg

SEQ ID NO: 1726 - RNA, 19 nt, Artificial Sequence
  Description of Artificial Sequence: Synthetic oligonucleotide
gcuggucucgaacuccuga

SEQ ID NO: 1727 - RNA, 19 nt, Artificial Sequence
  Description of Artificial Sequence: Synthetic oligonucleotide
accucaagugauucaccca

SEQ ID NO: 1728 - RNA, 19 nt, Artificial Sequence
  Description of Artificial Sequence: Synthetic oligonucleotide
accuuggccucauaaaccu

SEQ ID NO: 1729 - RNA, 19 nt, Artificial Sequence
  Description of Artificial Sequence: Synthetic oligonucleotide
uguuuugcagaacucauuu

SEQ ID NO: 1730 - RNA, 19 nt, Artificial Sequence
  Description of Artificial Sequence: Synthetic oligonucleotide
uauucagcaaauauuuauu

SEQ ID NO: 1731 - RNA, 19 nt, Artificial Sequence
  Description of Artificial Sequence: Synthetic oligonucleotide
ugagugccuaccagaugcc

SEQ ID NO: 1732 - RNA, 19 nt, Artificial Sequence
  Description of Artificial Sequence: Synthetic oligonucleotide
cagucaccgcacaaggcac

SEQ ID NO: 1733 - RNA, 19 nt, Artificial Sequence
  Description of Artificial Sequence: Synthetic oligonucleotide
cuggguauaugguaucccc

SEQ ID NO: 1734 - RNA, 19 nt, Artificial Sequence
  Description of Artificial Sequence: Synthetic oligonucleotide
caaacaagagacauaaucc

SEQ ID NO: 1735 - RNA, 19 nt, Artificial Sequence
  Description of Artificial Sequence: Synthetic oligonucleotide
ccgguccuuagguagugcu

SEQ ID NO: 1736 - RNA, 19 nt, Artificial Sequence
  Description of Artificial Sequence: Synthetic oligonucleotide
uaguguggucuguaauauc

SEQ ID NO: 1737 - RNA, 19 nt, Artificial Sequence
  Description of Artificial Sequence: Synthetic oligonucleotide
cuuacuaaggccuuuggua

SEQ ID NO: 1738 - RNA, 19 nt, Artificial Sequence
  Description of Artificial Sequence: Synthetic oligonucleotide
auacgacccagagauaaca

SEQ ID NO: 1739 - RNA, 19 nt, Artificial Sequence
  Description of Artificial Sequence: Synthetic oligonucleotide
acgaugcguauuuuaguuu

SEQ ID NO: 1740 - RNA, 19 nt, Artificial Sequence
  Description of Artificial Sequence: Synthetic oligonucleotide
uugcaaagaagggguuugg

SEQ ID NO: 1741 - RNA, 19 nt, Artificial Sequence
  Description of Artificial Sequence: Synthetic oligonucleotide
gucucugugccagcucuau

SEQ ID NO: 1742 - RNA, 19 nt, Artificial Sequence
  Description of Artificial Sequence: Synthetic oligonucleotide
uaauuguuuugcuacgauu

SEQ ID NO: 1743 - RNA, 19 nt, Artificial Sequence
  Description of Artificial Sequence: Synthetic oligonucleotide
uccacugaaacucuucgau

SEQ ID NO: 1744 - RNA, 19 nt, Artificial Sequence
  Description of Artificial Sequence: Synthetic oligonucleotide
ucaagcuacuuuauguaaa

SEQ ID NO: 1745 - RNA, 19 nt, Artificial Sequence
  Description of Artificial Sequence: Synthetic oligonucleotide
aucacuucauuguuuuaaa

SEQ ID NO: 1746 - RNA, 19 nt, Artificial Sequence
  Description of Artificial Sequence: Synthetic oligonucleotide
aggaauaaacuugauuaua

SEQ ID NO: 1747 - RNA, 19 nt, Artificial Sequence
  Description of Artificial Sequence: Synthetic oligonucleotide
auuguuuuuuuauuuggca

SEQ ID NO: 1748 - RNA, 19 nt, Artificial Sequence
  Description of Artificial Sequence: Synthetic oligonucleotide
auaacugugauucuuuuag

SEQ ID NO: 1749 - RNA, 19 nt, Artificial Sequence
  Description of Artificial Sequence: Synthetic oligonucleotide
ggacaauuacuguacacau

SEQ ID NO: 1750 - RNA, 19 nt, Artificial Sequence
  Description of Artificial Sequence: Synthetic oligonucleotide
uuaagguguaugucagaua

SEQ ID NO: 1751 - RNA, 19 nt, Artificial Sequence
  Description of Artificial Sequence: Synthetic oligonucleotide
auucauauugacccaaaug

SEQ ID NO: 1752 - RNA, 19 nt, Artificial Sequence
  Description of Artificial Sequence: Synthetic oligonucleotide
guguaauauuccaguuuuc

SEQ ID NO: 1753 - RNA, 19 nt, Artificial Sequence
  Description of Artificial Sequence: Synthetic oligonucleotide
cucugcauaaguaauuaaa

SEQ ID NO: 1754 - RNA, 19 nt, Artificial Sequence
  Description of Artificial Sequence: Synthetic oligonucleotide
aauauacuuaaaaauuaau

SEQ ID NO: 1755 - RNA, 19 nt, Artificial Sequence
  Description of Artificial Sequence: Synthetic oligonucleotide
uaguuuuaucuggguacaa

SEQ ID NO: 1756 - RNA, 19 nt, Artificial Sequence
  Description of Artificial Sequence: Synthetic oligonucleotide
aauaaacaggugccugaac

SEQ ID NO: 1757 - RNA, 19 nt, Artificial Sequence
  Description of Artificial Sequence: Synthetic oligonucleotide
cuaguucacagacaaggaa

SEQ ID NO: 1758 - RNA, 19 nt, Artificial Sequence
  Description of Artificial Sequence: Synthetic oligonucleotide
aacuucuauguaaaaauca

SEQ ID NO: 1759 - RNA, 19 nt, Artificial Sequence
  Description of Artificial Sequence: Synthetic oligonucleotide
acuaugauuucugaauugc

SEQ ID NO: 1760 - RNA, 19 nt, Artificial Sequence
  Description of Artificial Sequence: Synthetic oligonucleotide
cuaugugaaacuacagauc

SEQ ID NO: 1761 - RNA, 19 nt, Artificial Sequence
  Description of Artificial Sequence: Synthetic oligonucleotide
cuuuggaacacuguuuagg

SEQ ID NO: 1762 - RNA, 19 nt, Artificial Sequence
  Description of Artificial Sequence: Synthetic oligonucleotide
guaggguguuaagacuuac

SEQ ID NO: 1763 - RNA, 19 nt, Artificial Sequence
  Description of Artificial Sequence: Synthetic oligonucleotide
cacaguaccucguuucuac

SEQ ID NO: 1764 - RNA, 19 nt, Artificial Sequence
  Description of Artificial Sequence: Synthetic oligonucleotide
cacagagaaagaaauggcc

SEQ ID NO: 1765 - RNA, 19 nt, Artificial Sequence
  Description of Artificial Sequence: Synthetic oligonucleotide
cauacuucaggaacugcag

SEQ ID NO: 1766 - RNA, 19 nt, Artificial Sequence
  Description of Artificial Sequence: Synthetic oligonucleotide
gugcuuaugaggggauauu

SEQ ID NO: 1767 - RNA, 19 nt, Artificial Sequence
  Description of Artificial Sequence: Synthetic oligonucleotide
uuaggccucuugaauuuuu

SEQ ID NO: 1768 - RNA, 19 nt, Artificial Sequence
  Description of Artificial Sequence: Synthetic oligonucleotide
ugauguagaugggcauuuu

SEQ ID NO: 1769 - RNA, 19 nt, Artificial Sequence
  Description of Artificial Sequence: Synthetic oligonucleotide
uuuuaagguagugguuaau

SEQ ID NO: 1770 - RNA, 19 nt, Artificial Sequence
  Description of Artificial Sequence: Synthetic oligonucleotide
uuaccuuuaugugaacuuu

SEQ ID NO: 1771 - RNA, 19 nt, Artificial Sequence
  Description of Artificial Sequence: Synthetic oligonucleotide
ugaaugguuuaacaaaaga

SEQ ID NO: 1772 - RNA, 19 nt, Artificial Sequence
  Description of Artificial Sequence: Synthetic oligonucleotide
auuuguuuuuguagagauu

SEQ ID NO: 1773 - RNA, 19 nt, Artificial Sequence
  Description of Artificial Sequence: Synthetic oligonucleotide
uuuaaagggggagaauucu

SEQ ID NO: 1774 - RNA, 19 nt, Artificial Sequence
  Description of Artificial Sequence: Synthetic oligonucleotide
uagaaauaaauguuaccua

SEQ ID NO: 1775 - RNA, 19 nt, Artificial Sequence
  Description of Artificial Sequence: Synthetic oligonucleotide
aauuauuacagccuuaaag

SEQ ID NO: 1776 - RNA, 19 nt, Artificial Sequence
  Description of Artificial Sequence: Synthetic oligonucleotide
gacaaaaauccuuguugaa

SEQ ID NO: 1777 - RNA, 19 nt, Artificial Sequence
  Description of Artificial Sequence: Synthetic oligonucleotide
aguuuuuuuaaaaaaagcu

SEQ ID NO: 1778 - RNA, 19 nt, Artificial Sequence
  Description of Artificial Sequence: Synthetic oligonucleotide
uaaauuacauagacuuagg

SEQ ID NO: 1779 - RNA, 19 nt, Artificial Sequence
  Description of Artificial Sequence: Synthetic oligonucleotide
gcauuaacauguuugugga

SEQ ID NO: 1780 - RNA, 19 nt, Artificial Sequence
  Description of Artificial Sequence: Synthetic oligonucleotide
aagaauauagcagacguau

SEQ ID NO: 1781 - RNA, 19 nt, Artificial Sequence
  Description of Artificial Sequence: Synthetic oligonucleotide
uauuguaucauuugaguga

SEQ ID NO: 1782 - RNA, 19 nt, Artificial Sequence
  Description of Artificial Sequence: Synthetic oligonucleotide
aauguucccaaguaggcau

SEQ ID NO: 1783 - RNA, 19 nt, Artificial Sequence
  Description of Artificial Sequence: Synthetic oligonucleotide
uucuaggcucuauuuaacu

SEQ ID NO: 1784 - RNA, 19 nt, Artificial Sequence
  Description of Artificial Sequence: Synthetic oligonucleotide
ugagucacacugcauagga

SEQ ID NO: 1785 - RNA, 19 nt, Artificial Sequence
  Description of Artificial Sequence: Synthetic oligonucleotide
aauuuagaaccuaacuuuu

SEQ ID NO: 1786 - RNA, 19 nt, Artificial Sequence
  Description of Artificial Sequence: Synthetic oligonucleotide
uauagguuaucaaaacugu

SEQ ID NO: 1787 - RNA, 19 nt, Artificial Sequence
  Description of Artificial Sequence: Synthetic oligonucleotide
uugucaccauugcacaauu

SEQ ID NO: 1788 - RNA, 19 nt, Artificial Sequence
  Description of Artificial Sequence: Synthetic oligonucleotide
uuuguccuaauauauacau

SEQ ID NO: 1789 - RNA, 19 nt, Artificial Sequence
  Description of Artificial Sequence: Synthetic oligonucleotide
uagaaacuuuguggggcau

SEQ ID NO: 1790 - RNA, 19 nt, Artificial Sequence
  Description of Artificial Sequence: Synthetic oligonucleotide
uguuaaguuacaguuugca

SEQ ID NO: 1791 - RNA, 19 nt, Artificial Sequence
  Description of Artificial Sequence: Synthetic oligonucleotide
acaaguucaucucauuugu

SEQ ID NO: 1792 - RNA, 19 nt, Artificial Sequence
  Description of Artificial Sequence: Synthetic oligonucleotide
uauuccauugauuuuuuuu

SEQ ID NO: 1793 - RNA, 19 nt, Artificial Sequence
  Description of Artificial Sequence: Synthetic oligonucleotide
uuucuucuaaacauuuuuu

SEQ ID NO: 1794 - RNA, 19 nt, Artificial Sequence
  Description of Artificial Sequence: Synthetic oligonucleotide
ucuucaaacaguauauaac

SEQ ID NO: 1795 - RNA, 19 nt, Artificial Sequence
  Description of Artificial Sequence: Synthetic oligonucleotide
cuuuuuuuaggggauuuuu

SEQ ID NO: 1796 - RNA, 19 nt, Artificial Sequence
  Description of Artificial Sequence: Synthetic oligonucleotide
uuuuuagacagcaaaaacu

SEQ ID NO: 1797 - RNA, 19 nt, Artificial Sequence
  Description of Artificial Sequence: Synthetic oligonucleotide
uaucugaagauuuccauuu

SEQ ID NO: 1798 - RNA, 19 nt, Artificial Sequence
  Description of Artificial Sequence: Synthetic oligonucleotide
ugucaaaaaguaaugauuu

SEQ ID NO: 1799 - RNA, 19 nt, Artificial Sequence
  Description of Artificial Sequence: Synthetic oligonucleotide
ucuugauaauuguguagua

SEQ ID NO: 1800 - RNA, 19 nt, Artificial Sequence
  Description of Artificial Sequence: Synthetic oligonucleotide
aauguuuuuuagaacccag

SEQ ID NO: 1801 - RNA, 19 nt, Artificial Sequence
  Description of Artificial Sequence: Synthetic oligonucleotide
gcaguuaccuuaaagcuga

SEQ ID NO: 1802 - RNA, 19 nt, Artificial Sequence
  Description of Artificial Sequence: Synthetic oligonucleotide
aauuuauauuuaguaacuu

SEQ ID NO: 1803 - RNA, 19 nt, Artificial Sequence
  Description of Artificial Sequence: Synthetic oligonucleotide
ucuguguuaauacuggaua

SEQ ID NO: 1804 - RNA, 19 nt, Artificial Sequence
  Description of Artificial Sequence: Synthetic oligonucleotide
agcaugaauucugcauuga

SEQ ID NO: 1805 - RNA, 19 nt, Artificial Sequence
  Description of Artificial Sequence: Synthetic oligonucleotide
agaaacugaauagcuguca

SEQ ID NO: 1806 - RNA, 19 nt, Artificial Sequence
  Description of Artificial Sequence: Synthetic oligonucleotide
auaaaaugaaacuuucuuu

SEQ ID NO: 1807 - RNA, 19 nt, Artificial Sequence
  Description of Artificial Sequence: Synthetic oligonucleotide
ucuaaagaaagauacucac

SEQ ID NO: 1808 - RNA, 19 nt, Artificial Sequence
  Description of Artificial Sequence: Synthetic oligonucleotide
caugaguucuugaagaaua

SEQ ID NO: 1809 - RNA, 19 nt, Artificial Sequence
  Description of Artificial Sequence: Synthetic oligonucleotide
agucauaacuagauuaaga

SEQ ID NO: 1810 - RNA, 19 nt, Artificial Sequence
  Description of Artificial Sequence: Synthetic oligonucleotide
aucuguguuuuaguuuaau

SEQ ID NO: 1811 - RNA, 19 nt, Artificial Sequence
  Description of Artificial Sequence: Synthetic oligonucleotide
uaguuugaagugccuguuu

SEQ ID NO: 1812 - RNA, 19 nt, Artificial Sequence
  Description of Artificial Sequence: Synthetic oligonucleotide
ugggauaaugauagguaau

SEQ ID NO: 1813 - RNA, 19 nt, Artificial Sequence
  Description of Artificial Sequence: Synthetic oligonucleotide
uuuagaugaauuuagggga

SEQ ID NO: 1814 - RNA, 19 nt, Artificial Sequence
  Description of Artificial Sequence: Synthetic oligonucleotide
aaaaaaaaguuaucugcag

SEQ ID NO: 1815 - RNA, 19 nt, Artificial Sequence
  Description of Artificial Sequence: Synthetic oligonucleotide
gauauguugagggcccauc

SEQ ID NO: 1816 - RNA, 19 nt, Artificial Sequence
  Description of Artificial Sequence: Synthetic oligonucleotide
cucuccccccacaccccca

SEQ ID NO: 1817 - RNA, 19 nt, Artificial Sequence
  Description of Artificial Sequence: Synthetic oligonucleotide
acagagcuaacuggguuac

SEQ ID NO: 1818 - RNA, 19 nt, Artificial Sequence
  Description of Artificial Sequence: Synthetic oligonucleotide
caguguuuuauccgaaagu

SEQ ID NO: 1819 - RNA, 19 nt, Artificial Sequence
  Description of Artificial Sequence: Synthetic oligonucleotide
uuuccaauuccacugucuu

SEQ ID NO: 1820 - RNA, 19 nt, Artificial Sequence
  Description of Artificial Sequence: Synthetic oligonucleotide
uguguuuucauguugaaaa

SEQ ID NO: 1821 - RNA, 19 nt, Artificial Sequence
  Description of Artificial Sequence: Synthetic oligonucleotide
auacuuuugcauuuuuccu

SEQ ID NO: 1822 - RNA, 19 nt, Artificial Sequence
  Description of Artificial Sequence: Synthetic oligonucleotide
uuugagugccaauuucuua

SEQ ID NO: 1823 - RNA, 19 nt, Artificial Sequence
  Description of Artificial Sequence: Synthetic oligonucleotide
acuaguacuauuucuuaau

SEQ ID NO: 1824 - RNA, 19 nt, Artificial Sequence
  Description of Artificial Sequence: Synthetic oligonucleotide
uguaacauguuuaccugga

SEQ ID NO: 1825 - RNA, 19 nt, Artificial Sequence
  Description of Artificial Sequence: Synthetic oligonucleotide
aauguauuuuaacuauuuu

SEQ ID NO: 1826 - RNA, 19 nt, Artificial Sequence
  Description of Artificial Sequence: Synthetic oligonucleotide
uuguauaguguaaacugaa

SEQ ID NO: 1827 - RNA, 19 nt, Artificial Sequence
  Description of Artificial Sequence: Synthetic oligonucleotide
aacaugcacauuuuguaca

SEQ ID NO: 1828 - RNA, 19 nt, Artificial Sequence
  Description of Artificial Sequence: Synthetic oligonucleotide
auugugcuuucuuuugugg

SEQ ID NO: 1829 - RNA, 19 nt, Artificial Sequence
  Description of Artificial Sequence: Synthetic oligonucleotide
ggacauaugcagugugauc

SEQ ID NO: 1830 - RNA, 19 nt, Artificial Sequence
  Description of Artificial Sequence: Synthetic oligonucleotide
ccaguuguuuuccaucauu

SEQ ID NO: 1831 - RNA, 19 nt, Artificial Sequence
  Description of Artificial Sequence: Synthetic oligonucleotide
uugguugcgcugaccuagg

SEQ ID NO: 1832 - RNA, 19 nt, Artificial Sequence
  Description of Artificial Sequence: Synthetic oligonucleotide
gaauguuggucauaucaaa

SEQ ID NO: 1833 - RNA, 19 nt, Artificial Sequence
  Description of Artificial Sequence: Synthetic oligonucleotide
acauuaaaaaugaccacuc

SEQ ID NO: 1834 - RNA, 19 nt, Artificial Sequence
  Description of Artificial Sequence: Synthetic oligonucleotide
cuuuuaauugaaauuaacu

SEQ ID NO: 1835 - RNA, 19 nt, Artificial Sequence
  Description of Artificial Sequence: Synthetic oligonucleotide
uuuuaaauguuuauaggag

SEQ ID NO: 1836 - RNA, 19 nt, Artificial Sequence
  Description of Artificial Sequence: Synthetic oligonucleotide
guaugugcugugaagugau

SEQ ID NO: 1837 - RNA, 19 nt, Artificial Sequence
  Description of Artificial Sequence: Synthetic oligonucleotide
ucuaaaauuuguaauauuu

SEQ ID NO: 1838 - RNA, 19 nt, Artificial Sequence
  Description of Artificial Sequence: Synthetic oligonucleotide
uuugucaugaacuguacua

SEQ ID NO: 1839 - RNA, 19 nt, Artificial Sequence
  Description of Artificial Sequence: Synthetic oligonucleotide
acuccuaauuauuguaaug

SEQ ID NO: 1840 - RNA, 19 nt, Artificial Sequence
  Description of Artificial Sequence: Synthetic oligonucleotide
guaauaaaaauaguuacag

SEQ ID NO: 1841 - RNA, 25 nt, Artificial Sequence
  Description of Artificial Sequence: Synthetic oligonucleotide
ggccgcggcggcggaggcagcagcg

SEQ ID NO: 1842 - RNA, 25 nt, Artificial Sequence
  Description of Artificial Sequence: Synthetic oligonucleotide
ggcggcggcaguggcggcggcgaag

SEQ ID NO: 1843 - RNA, 25 nt, Artificial Sequence
  Description of Artificial Sequence: Synthetic oligonucleotide
gguggcggcggcucggccaguacuc

SEQ ID NO: 1844 - RNA, 25 nt, Artificial Sequence
  Description of Artificial Sequence: Synthetic oligonucleotide
cccggcccccgccauuucggacugg

SEQ ID NO: 1845 - RNA, 25 nt, Artificial Sequence
  Description of Artificial Sequence: Synthetic oligonucleotide
ggagcgagcgcggcgcaggcacuga

SEQ ID NO: 1846 - RNA, 25 nt, Artificial Sequence
  Description of Artificial Sequence: Synthetic oligonucleotide
aaggcggcggcggggccagaggcuc

SEQ ID NO: 1847 - RNA, 25 nt, Artificial Sequence
  Description of Artificial Sequence: Synthetic oligonucleotide
cagcggcucccaggugcgggagaga

SEQ ID NO: 1848 - RNA, 25 nt, Artificial Sequence
  Description of Artificial Sequence: Synthetic oligonucleotide
aggccugcugaaaaugacugaauau

SEQ ID NO: 1849 - RNA, 25 nt, Artificial Sequence
  Description of Artificial Sequence: Synthetic oligonucleotide
uaaacuugugguaguuggagcuggu

SEQ ID NO: 1850 - RNA, 25 nt, Artificial Sequence
  Description of Artificial Sequence: Synthetic oligonucleotide
uggcguaggcaagagugccuugacg

SEQ ID NO: 1851 - RNA, 25 nt, Artificial Sequence
  Description of Artificial Sequence: Synthetic oligonucleotide
gauacagcuaauucagaaucauuuu

SEQ ID NO: 1852 - RNA, 25 nt, Artificial Sequence
  Description of Artificial Sequence: Synthetic oligonucleotide
uguggacgaauaugauccaacaaua

SEQ ID NO: 1853 - RNA, 25 nt, Artificial Sequence
  Description of Artificial Sequence: Synthetic oligonucleotide
agaggauuccuacaggaagcaagua

SEQ ID NO: 1854 - RNA, 25 nt, Artificial Sequence
  Description of Artificial Sequence: Synthetic oligonucleotide
aguaauugauggagaaaccugucuc

SEQ ID NO: 1855 - RNA, 25 nt, Artificial Sequence
  Description of Artificial Sequence: Synthetic oligonucleotide
cuuggauauucucgacacagcaggu

SEQ ID NO: 1856 - RNA, 25 nt, Artificial Sequence
  Description of Artificial Sequence: Synthetic oligonucleotide
ucaagaggaguacagugcaaugagg

SEQ ID NO: 1857 - RNA, 25 nt, Artificial Sequence
  Description of Artificial Sequence: Synthetic oligonucleotide
ggaccaguacaugaggacuggggag

SEQ ID NO: 1858 - RNA, 25 nt, Artificial Sequence
  Description of Artificial Sequence: Synthetic oligonucleotide
gggcuuucuuuguguauuugccaua

SEQ ID NO: 1859 - RNA, 25 nt, Artificial Sequence
  Description of Artificial Sequence: Synthetic oligonucleotide
aaauaauacuaaaucauuugaagau

SEQ ID NO: 1860 - RNA, 25 nt, Artificial Sequence
  Description of Artificial Sequence: Synthetic oligonucleotide
uauucaccauuauagagaacaaauu

SEQ ID NO: 1861 - RNA, 25 nt, Artificial Sequence
  Description of Artificial Sequence: Synthetic oligonucleotide
uaaaagaguuaaggacucugaagau

SEQ ID NO: 1862 - RNA, 25 nt, Artificial Sequence
  Description of Artificial Sequence: Synthetic oligonucleotide
uguaccuaugguccuaguaggaaau

SEQ ID NO: 1863 - RNA, 25 nt, Artificial Sequence
  Description of Artificial Sequence: Synthetic oligonucleotide
uaaaugugauuugccuucuagaaca

SEQ ID NO: 1864 - RNA, 25 nt, Artificial Sequence
  Description of Artificial Sequence: Synthetic oligonucleotide
aguagacacaaaacaggcucaggac

SEQ ID NO: 1865 - RNA, 25 nt, Artificial Sequence
  Description of Artificial Sequence: Synthetic oligonucleotide
cuuagcaagaaguuauggaauuccu

SEQ ID NO: 1866 - RNA, 25 nt, Artificial Sequence
  Description of Artificial Sequence: Synthetic oligonucleotide
uuuuauugaaacaucagcaaagaca

SEQ ID NO: 1867 - RNA, 25 nt, Artificial Sequence
  Description of Artificial Sequence: Synthetic oligonucleotide
aagacagagaguggaggaugcuuuu

SEQ ID NO: 1868 - RNA, 25 nt, Artificial Sequence
  Description of Artificial Sequence: Synthetic oligonucleotide
uuauacauuggugagggagauccga

SEQ ID NO: 1869 - RNA, 25 nt, Artificial Sequence
  Description of Artificial Sequence: Synthetic oligonucleotide
acaauacagauugaaaaaaaucagc

SEQ ID NO: 1870 - RNA, 25 nt, Artificial Sequence
  Description of Artificial Sequence: Synthetic oligonucleotide
caaagaagaaaagacuccuggcugu

SEQ ID NO: 1871 - RNA, 25 nt, Artificial Sequence
  Description of Artificial Sequence: Synthetic oligonucleotide
ugugaaaauuaaaaaaugcauuaua

SEQ ID NO: 1872 - RNA, 25 nt, Artificial Sequence
  Description of Artificial Sequence: Synthetic oligonucleotide
aauguaaucuggguguugaugaugc

SEQ ID NO: 1873 - RNA, 25 nt, Artificial Sequence
  Description of Artificial Sequence: Synthetic oligonucleotide
ccuucuauacauuaguucgagaaau

SEQ ID NO: 1874 - RNA, 25 nt, Artificial Sequence
  Description of Artificial Sequence: Synthetic oligonucleotide
uucgaaaacauaaagaaaagaugag

SEQ ID NO: 1875 - RNA, 25 nt, Artificial Sequence
  Description of Artificial Sequence: Synthetic oligonucleotide
gcaaagaugguaaaaagaagaaaaa

SEQ ID NO: 1876 - RNA, 25 nt, Artificial Sequence
  Description of Artificial Sequence: Synthetic oligonucleotide
agaagucaaagacaaaguguguaau

SEQ ID NO: 1877 - RNA, 25 nt, Artificial Sequence
  Description of Artificial Sequence: Synthetic oligonucleotide
uuauguaaauacaauuuguacuuuu

SEQ ID NO: 1878 - RNA, 25 nt, Artificial Sequence
  Description of Artificial Sequence: Synthetic oligonucleotide
uuucuuaaggcauacuaguacaagu

SEQ ID NO: 1879 - RNA, 25 nt, Artificial Sequence
  Description of Artificial Sequence: Synthetic oligonucleotide
ugguaauuuuuguacauuacacuaa

SEQ ID NO: 1880 - RNA, 25 nt, Artificial Sequence
  Description of Artificial Sequence: Synthetic oligonucleotide
aauuauuagcauuuguuuuagcauu

SEQ ID NO: 1881 - RNA, 25 nt, Artificial Sequence
  Description of Artificial Sequence: Synthetic oligonucleotide
uaccuaauuuuuuuccugcuccaug

SEQ ID NO: 1882 - RNA, 25 nt, Artificial Sequence
  Description of Artificial Sequence: Synthetic oligonucleotide
gcagacuguuagcuuuuaccuuaaa

SEQ ID NO: 1883 - RNA, 25 nt, Artificial Sequence
  Description of Artificial Sequence: Synthetic oligonucleotide
augcuuauuuuaaaaugacagugga

SEQ ID NO: 1884 - RNA, 25 nt, Artificial Sequence
  Description of Artificial Sequence: Synthetic oligonucleotide
aaguuuuuuuuuccucuaagugcca

SEQ ID NO: 1885 - RNA, 25 nt, Artificial Sequence
  Description of Artificial Sequence: Synthetic oligonucleotide
aguauucccagaguuuugguuuuug

SEQ ID NO: 1886 - RNA, 25 nt, Artificial Sequence
  Description of Artificial Sequence: Synthetic oligonucleotide
gaacuagcaaugccugugaaaaaga

SEQ ID NO: 1887 - RNA, 25 nt, Artificial Sequence
  Description of Artificial Sequence: Synthetic oligonucleotide
aaacugaauaccuaagauuucuguc

SEQ ID NO: 1888 - RNA, 25 nt, Artificial Sequence
  Description of Artificial Sequence: Synthetic oligonucleotide
cuugggguuuuuggugcaugcaguu

SEQ ID NO: 1889 - RNA, 25 nt, Artificial Sequence
  Description of Artificial Sequence: Synthetic oligonucleotide
ugauuacuucuuauuuuucuuacca

SEQ ID NO: 1890 - RNA, 25 nt, Artificial Sequence
  Description of Artificial Sequence: Synthetic oligonucleotide
aauugugaauguuggugugaaacaa

SEQ ID NO: 1891 - RNA, 25 nt, Artificial Sequence
  Description of Artificial Sequence: Synthetic oligonucleotide
aauuaaugaagcuuuugaaucaucc

SEQ ID NO: 1892 - RNA, 25 nt, Artificial Sequence
  Description of Artificial Sequence: Synthetic oligonucleotide
ccuauucuguguuuuaucuagucac

SEQ ID NO: 1893 - RNA, 25 nt, Artificial Sequence
  Description of Artificial Sequence: Synthetic oligonucleotide
cauaaauggauuaauuacuaauuuc

SEQ ID NO: 1894 - RNA, 25 nt, Artificial Sequence
  Description of Artificial Sequence: Synthetic oligonucleotide
caguugagaccuucuaauugguuuu

SEQ ID NO: 1895 - RNA, 25 nt, Artificial Sequence
  Description of Artificial Sequence: Synthetic oligonucleotide
uuacugaaacauugagggaacacaa

SEQ ID NO: 1896 - RNA, 25 nt, Artificial Sequence
  Description of Artificial Sequence: Synthetic oligonucleotide
aauuuaugggcuuccugaugaugau

SEQ ID NO: 1897 - RNA, 25 nt, Artificial Sequence
  Description of Artificial Sequence: Synthetic oligonucleotide
uucuucuaggcaucauguccuauag

SEQ ID NO: 1898 - RNA, 25 nt, Artificial Sequence
  Description of Artificial Sequence: Synthetic oligonucleotide
guuugucaucccugaugaauguaaa

SEQ ID NO: 1899 - RNA, 25 nt, Artificial Sequence
  Description of Artificial Sequence: Synthetic oligonucleotide
aguuacacuguucacaaagguuuug

SEQ ID NO: 1900 - RNA, 25 nt, Artificial Sequence
  Description of Artificial Sequence: Synthetic oligonucleotide
gucuccuuuccacugcuauuaguca

SEQ ID NO: 1901 - RNA, 25 nt, Artificial Sequence
  Description of Artificial Sequence: Synthetic oligonucleotide
auggucacucuccccaaaauauuau

SEQ ID NO: 1902 - RNA, 25 nt, Artificial Sequence
  Description of Artificial Sequence: Synthetic oligonucleotide
uauuuuuucuauaaaaagaaaaaaa

SEQ ID NO: 1903 - RNA, 25 nt, Artificial Sequence
  Description of Artificial Sequence: Synthetic oligonucleotide
auggaaaaaaauuacaaggcaaugg

SEQ ID NO: 1904 - RNA, 25 nt, Artificial Sequence
  Description of Artificial Sequence: Synthetic oligonucleotide
gaaacuauuauaaggccauuuccuu

SEQ ID NO: 1905 - RNA, 25 nt, Artificial Sequence
  Description of Artificial Sequence: Synthetic oligonucleotide
uuucacauuagauaaauuacuauaa

SEQ ID NO: 1906 - RNA, 25 nt, Artificial Sequence
  Description of Artificial Sequence: Synthetic oligonucleotide
aagacuccuaauagcuuuuccuguu

SEQ ID NO: 1907 - RNA, 25 nt, Artificial Sequence
  Description of Artificial Sequence: Synthetic oligonucleotide
uaaggcagacccaguaugaaauggg

SEQ ID NO: 1908 - RNA, 25 nt, Artificial Sequence
  Description of Artificial Sequence: Synthetic oligonucleotide
ggauuauuauagcaaccauuuuggg

SEQ ID NO: 1909 - RNA, 25 nt, Artificial Sequence
  Description of Artificial Sequence: Synthetic oligonucleotide
ggcuauauuuacaugcuacuaaauu

SEQ ID NO: 1910 - RNA, 25 nt, Artificial Sequence
  Description of Artificial Sequence: Synthetic oligonucleotide
uuuuauaauaauugaaaagauuuua

SEQ ID NO: 1911 - RNA, 25 nt, Artificial Sequence
  Description of Artificial Sequence: Synthetic oligonucleotide
aacaaguauaaaaaauucucauagg

SEQ ID NO: 1912 - RNA, 25 nt, Artificial Sequence
  Description of Artificial Sequence: Synthetic oligonucleotide
gaauuaaauguagucucccuguguc

SEQ ID NO: 1913 - RNA, 25 nt, Artificial Sequence
  Description of Artificial Sequence: Synthetic oligonucleotide
cagacugcucuuucauaguauaacu

SEQ ID NO: 1914 - RNA, 25 nt, Artificial Sequence
  Description of Artificial Sequence: Synthetic oligonucleotide
uuuaaaucuuuucuucaacuugagu

SEQ ID NO: 1915 - RNA, 25 nt, Artificial Sequence
  Description of Artificial Sequence: Synthetic oligonucleotide
ucuuugaagauaguuuuaauucugc

SEQ ID NO: 1916 - RNA, 25 nt, Artificial Sequence
  Description of Artificial Sequence: Synthetic oligonucleotide
cuugugacauuaaaagauuauuugg

SEQ ID NO: 1917 - RNA, 25 nt, Artificial Sequence
  Description of Artificial Sequence: Synthetic oligonucleotide
ggccaguuauagcuuauuagguguu

SEQ ID NO: 1918 - RNA, 25 nt, Artificial Sequence
  Description of Artificial Sequence: Synthetic oligonucleotide
ugaagagaccaagguugcaaggcca

SEQ ID NO: 1919 - RNA, 25 nt, Artificial Sequence
  Description of Artificial Sequence: Synthetic oligonucleotide
aggcccugugugaaccuuugagcuu

SEQ ID NO: 1920 - RNA, 25 nt, Artificial Sequence
  Description of Artificial Sequence: Synthetic oligonucleotide
uucauagagaguuucacagcaugga

SEQ ID NO: 1921 - RNA, 25 nt, Artificial Sequence
  Description of Artificial Sequence: Synthetic oligonucleotide
acuguguccccacggucauccagug

SEQ ID NO: 1922 - RNA, 25 nt, Artificial Sequence
  Description of Artificial Sequence: Synthetic oligonucleotide
guugucaugcauugguuagucaaaa

SEQ ID NO: 1923 - RNA, 25 nt, Artificial Sequence
  Description of Artificial Sequence: Synthetic oligonucleotide
auggggagggacuagggcaguuugg

SEQ ID NO: 1924 - RNA, 25 nt, Artificial Sequence
  Description of Artificial Sequence: Synthetic oligonucleotide
gauagcucaacaagauacaaucuca

SEQ ID NO: 1925 - RNA, 25 nt, Artificial Sequence
  Description of Artificial Sequence: Synthetic oligonucleotide
acucuguggugguccugcugacaaa

SEQ ID NO: 1926 - RNA, 25 nt, Artificial Sequence
  Description of Artificial Sequence: Synthetic oligonucleotide
aucaagagcauugcuuuuguuucuu

SEQ ID NO: 1927 - RNA, 25 nt, Artificial Sequence
  Description of Artificial Sequence: Synthetic oligonucleotide
uaagaaaacaaacucuuuuuuaaaa

SEQ ID NO: 1928 - RNA, 25 nt, Artificial Sequence
  Description of Artificial Sequence: Synthetic oligonucleotide
aauuacuuuuaaauauuaacucaaa

SEQ ID NO: 1929 - RNA, 25 nt, Artificial Sequence
  Description of Artificial Sequence: Synthetic oligonucleotide
aaguugagauuuuggggugguggug

SEQ ID NO: 1930 - RNA, 25 nt, Artificial Sequence
  Description of Artificial Sequence: Synthetic oligonucleotide
uaaacaaugaagugaaaaaguuuua

SEQ ID NO: 1931 - RNA, 25 nt, Artificial Sequence
  Description of Artificial Sequence: Synthetic oligonucleotide
acaaucucuagguuuggcuaguucu

SEQ ID NO: 1932 - RNA, 25 nt, Artificial Sequence
  Description of Artificial Sequence: Synthetic oligonucleotide
ucuuaacacugguuaaauuaacauu

SEQ ID NO: 1933 - RNA, 25 nt, Artificial Sequence
  Description of Artificial Sequence: Synthetic oligonucleotide
ugcauaaacacuuuucaagucugau

SEQ ID NO: 1934 - RNA, 25 nt, Artificial Sequence
  Description of Artificial Sequence: Synthetic oligonucleotide
uccauauuuaauaaugcuuuaaaau

SEQ ID NO: 1935 - RNA, 25 nt, Artificial Sequence
  Description of Artificial Sequence: Synthetic oligonucleotide
uaaaaauaaaaacaauccuuuugau

SEQ ID NO: 1936 - RNA, 25 nt, Artificial Sequence
  Description of Artificial Sequence: Synthetic oligonucleotide
uaaauuuaaaauguuacuuauuuua

SEQ ID NO: 1937 - RNA, 25 nt, Artificial Sequence
  Description of Artificial Sequence: Synthetic oligonucleotide
aaaauaaaugaagugagauggcaug

SEQ ID NO: 1938 - RNA, 25 nt, Artificial Sequence
  Description of Artificial Sequence: Synthetic oligonucleotide
ggugaggugaaaguaucacuggacu

SEQ ID NO: 1939 - RNA, 25 nt, Artificial Sequence
  Description of Artificial Sequence: Synthetic oligonucleotide
uaggaagaaggugacuuagguucua

SEQ ID NO: 1940 - RNA, 25 nt, Artificial Sequence
  Description of Artificial Sequence: Synthetic oligonucleotide
agauaggugucuuuuaggacucuga

SEQ ID NO: 1941 - RNA, 25 nt, Artificial Sequence
  Description of Artificial Sequence: Synthetic oligonucleotide
auuuugaggacaucacuuacuaucc

SEQ ID NO: 1942 - RNA, 25 nt, Artificial Sequence
  Description of Artificial Sequence: Synthetic oligonucleotide
cauuucuucauguuaaaagaaguca

SEQ ID NO: 1943 - RNA, 25 nt, Artificial Sequence
  Description of Artificial Sequence: Synthetic oligonucleotide
uuuacaacuauguaauuuauauucc

SEQ ID NO: 1944 - RNA, 25 nt, Artificial Sequence
  Description of Artificial Sequence: Synthetic oligonucleotide
cauuuacauaaggauacacuuauuu

SEQ ID NO: 1945 - RNA, 25 nt, Artificial Sequence
  Description of Artificial Sequence: Synthetic oligonucleotide
ugucaagcucagcacaaucuguaaa

SEQ ID NO: 1946 - RNA, 25 nt, Artificial Sequence
  Description of Artificial Sequence: Synthetic oligonucleotide
auuuuuaaccuauguuacaccaucu

SEQ ID NO: 1947 - RNA, 25 nt, Artificial Sequence
  Description of Artificial Sequence: Synthetic oligonucleotide
uucagugccagucuugggcaaaauu

SEQ ID NO: 1948 - RNA, 25 nt, Artificial Sequence
  Description of Artificial Sequence: Synthetic oligonucleotide
ugugcaagaggugaaguuuauauuu

SEQ ID NO: 1949 - RNA, 25 nt, Artificial Sequence
  Description of Artificial Sequence: Synthetic oligonucleotide
ugaauauccauucucguuuuaggac

SEQ ID NO: 1950 - RNA, 25 nt, Artificial Sequence
  Description of Artificial Sequence: Synthetic oligonucleotide
cucuucuuccauauuagugucaucu

SEQ ID NO: 1951 - RNA, 25 nt, Artificial Sequence
  Description of Artificial Sequence: Synthetic oligonucleotide
uugccucccuaccuuccacaugccc

SEQ ID NO: 1952 - RNA, 25 nt, Artificial Sequence
  Description of Artificial Sequence: Synthetic oligonucleotide
ccaugacuugaugcaguuuuaauac

SEQ ID NO: 1953 - RNA, 25 nt, Artificial Sequence
  Description of Artificial Sequence: Synthetic oligonucleotide
cuuguaauuccccuaaccauaagau

SEQ ID NO: 1954 - RNA, 25 nt, Artificial Sequence
  Description of Artificial Sequence: Synthetic oligonucleotide
uuuacugcugcuguggauaucucca

SEQ ID NO: 1955 - RNA, 25 nt, Artificial Sequence
  Description of Artificial Sequence: Synthetic oligonucleotide
augaaguuuucccacugagucacau

SEQ ID NO: 1956 - RNA, 25 nt, Artificial Sequence
  Description of Artificial Sequence: Synthetic oligonucleotide
ucagaaaugcccuacaucuuauuuc

SEQ ID NO: 1957 - RNA, 25 nt, Artificial Sequence
  Description of Artificial Sequence: Synthetic oligonucleotide
ccucagggcucaagagaaucugaca

SEQ ID NO: 1958 - RNA, 25 nt, Artificial Sequence
  Description of Artificial Sequence: Synthetic oligonucleotide
agauaccauaaagggauuugaccua

SEQ ID NO: 1959 - RNA, 25 nt, Artificial Sequence
  Description of Artificial Sequence: Synthetic oligonucleotide
aaucacuaauuuucaggugguggcu

SEQ ID NO: 1960 - RNA, 25 nt, Artificial Sequence
  Description of Artificial Sequence: Synthetic oligonucleotide
ugaugcuuugaacaucucuuugcug

SEQ ID NO: 1961 - RNA, 25 nt, Artificial Sequence
  Description of Artificial Sequence: Synthetic oligonucleotide
gcccaauccauuagcgacaguagga

SEQ ID NO: 1962 - RNA, 25 nt, Artificial Sequence
  Description of Artificial Sequence: Synthetic oligonucleotide
auuuuucaaaccugguaugaauaga

SEQ ID NO: 1963 - RNA, 25 nt, Artificial Sequence
  Description of Artificial Sequence: Synthetic oligonucleotide
acagaacccuauccaguggaaggag

SEQ ID NO: 1964 - RNA, 25 nt, Artificial Sequence
  Description of Artificial Sequence: Synthetic oligonucleotide
gaauuuaauaaagauagugcugaaa

SEQ ID NO: 1965 - RNA, 25 nt, Artificial Sequence
  Description of Artificial Sequence: Synthetic oligonucleotide
agaauuccuuagguaaucuauaacu

SEQ ID NO: 1966 - RNA, 25 nt, Artificial Sequence
  Description of Artificial Sequence: Synthetic oligonucleotide
uaggacuacuccugguaacaguaau

SEQ ID NO: 1967 - RNA, 25 nt, Artificial Sequence
  Description of Artificial Sequence: Synthetic oligonucleotide
uacauuccauuguuuuaguaaccag

SEQ ID NO: 1968 - RNA, 25 nt, Artificial Sequence
  Description of Artificial Sequence: Synthetic oligonucleotide
gaaaucuucaugcaaugaaaaauac

SEQ ID NO: 1969 - RNA, 25 nt, Artificial Sequence
  Description of Artificial Sequence: Synthetic oligonucleotide
cuuuaauucaugaagcuuacuuuuu

SEQ ID NO: 1970 - RNA, 25 nt, Artificial Sequence
  Description of Artificial Sequence: Synthetic oligonucleotide
uuuuuuuggugucagagucucgcuc

SEQ ID NO: 1971 - RNA, 25 nt, Artificial Sequence
  Description of Artificial Sequence: Synthetic oligonucleotide
cuugucacccaggcuggaaugcagu

SEQ ID NO: 1972 - RNA, 25 nt, Artificial Sequence
  Description of Artificial Sequence: Synthetic oligonucleotide
uggcgccaucucagcucacugcaac

SEQ ID NO: 1973 - RNA, 25 nt, Artificial Sequence
  Description of Artificial Sequence: Synthetic oligonucleotide
ccuccaucucccagguucaagcgau

SEQ ID NO: 1974 - RNA, 25 nt, Artificial Sequence
  Description of Artificial Sequence: Synthetic oligonucleotide
uucucgugccucggccuccugagua

SEQ ID NO: 1975 - RNA, 25 nt, Artificial Sequence
  Description of Artificial Sequence: Synthetic oligonucleotide
agcugggauuacaggcgugugccac

SEQ ID NO: 1976 - RNA, 25 nt, Artificial Sequence
  Description of Artificial Sequence: Synthetic oligonucleotide
cuacacucaacuaauuuuuguauuu

SEQ ID NO: 1977 - RNA, 25 nt, Artificial Sequence
  Description of Artificial Sequence: Synthetic oligonucleotide
uuuaggagagacgggguuucacccu

SEQ ID NO: 1978 - RNA, 25 nt, Artificial Sequence
  Description of Artificial Sequence: Synthetic oligonucleotide
uguuggccaggcuggucucgaacuc

SEQ ID NO: 1979 - RNA, 25 nt, Artificial Sequence
  Description of Artificial Sequence: Synthetic oligonucleotide
ccugaccucaagugauucacccacc

SEQ ID NO: 1980 - RNA, 25 nt, Artificial Sequence
  Description of Artificial Sequence: Synthetic oligonucleotide
cuuggccucauaaaccuguuuugca

SEQ ID NO: 1981 - RNA, 25 nt, Artificial Sequence
  Description of Artificial Sequence: Synthetic oligonucleotide
agaacucauuuauucagcaaauauu

SEQ ID NO: 1982 - RNA, 25 nt, Artificial Sequence
  Description of Artificial Sequence: Synthetic oligonucleotide
uuauugagugccuaccagaugccag

SEQ ID NO: 1983 - RNA, 25 nt, Artificial Sequence
  Description of Artificial Sequence: Synthetic oligonucleotide
gucaccgcacaaggcacuggguaua

SEQ ID NO: 1984 - RNA, 25 nt, Artificial Sequence
  Description of Artificial Sequence: Synthetic oligonucleotide
augguauccccaaacaagagacaua

SEQ ID NO: 1985 - RNA, 25 nt, Artificial Sequence
  Description of Artificial Sequence: Synthetic oligonucleotide
aaucccgguccuuagguagugcuag

SEQ ID NO: 1986 - RNA, 25 nt, Artificial Sequence
  Description of Artificial Sequence: Synthetic oligonucleotide
guguggucuguaauaucuuacuaag

SEQ ID NO: 1987 - RNA, 25 nt, Artificial Sequence
  Description of Artificial Sequence: Synthetic oligonucleotide
ggccuuugguauacgacccagagau

SEQ ID NO: 1988 - RNA, 25 nt, Artificial Sequence
  Description of Artificial Sequence: Synthetic oligonucleotide
uaacacgaugcguauuuuaguuuug

SEQ ID NO: 1989 - RNA, 25 nt, Artificial Sequence
  Description of Artificial Sequence: Synthetic oligonucleotide
gcaaagaagggguuuggucucugug

SEQ ID NO: 1990 - RNA, 25 nt, Artificial Sequence
  Description of Artificial Sequence: Synthetic oligonucleotide
gccagcucuauaauuguuuugcuac

SEQ ID NO: 1991 - RNA, 25 nt, Artificial Sequence
  Description of Artificial Sequence: Synthetic oligonucleotide
cgauuccacugaaacucuucgauca

SEQ ID NO: 1992 - RNA, 25 nt, Artificial Sequence
  Description of Artificial Sequence: Synthetic oligonucleotide
aagcuacuuuauguaaaucacuuca

SEQ ID NO: 1993 - RNA, 25 nt, Artificial Sequence
  Description of Artificial Sequence: Synthetic oligonucleotide
auuguuuuaaaggaauaaacuugau

SEQ ID NO: 1994 - RNA, 25 nt, Artificial Sequence
  Description of Artificial Sequence: Synthetic oligonucleotide
uuauauuguuuuuuuauuuggcaua

SEQ ID NO: 1995 - RNA, 25 nt, Artificial Sequence
  Description of Artificial Sequence: Synthetic oligonucleotide
aacugugauucuuuuaggacaauua

SEQ ID NO: 1996 - RNA, 25 nt, Artificial Sequence
  Description of Artificial Sequence: Synthetic oligonucleotide
acuguacacauuaagguguauguca

SEQ ID NO: 1997 - RNA, 25 nt, Artificial Sequence
  Description of Artificial Sequence: Synthetic oligonucleotide
agauauucauauugacccaaaugug

SEQ ID NO: 1998 - RNA, 25 nt, Artificial Sequence
  Description of Artificial Sequence: Synthetic oligonucleotide
guaauauuccaguuuucucugcaua

SEQ ID NO: 1999 - RNA, 25 nt, Artificial Sequence
  Description of Artificial Sequence: Synthetic oligonucleotide
aaguaauuaaaauauacuuaaaaau

SEQ ID NO: 2000 - RNA, 25 nt, Artificial Sequence
  Description of Artificial Sequence: Synthetic oligonucleotide
uuaauaguuuuaucuggguacaaau

SEQ ID NO: 2001 - RNA, 25 nt, Artificial Sequence
  Description of Artificial Sequence: Synthetic oligonucleotide
uaaacaggugccugaacuaguucac

SEQ ID NO: 2002 - RNA, 25 nt, Artificial Sequence
  Description of Artificial Sequence: Synthetic oligonucleotide
cagacaaggaaacuucuauguaaaa

SEQ ID NO: 2003 - RNA, 25 nt, Artificial Sequence
  Description of Artificial Sequence: Synthetic oligonucleotide
aaucacuaugauuucugaauugcua

SEQ ID NO: 2004 - RNA, 25 nt, Artificial Sequence
  Description of Artificial Sequence: Synthetic oligonucleotide
augugaaacuacagaucuuuggaac

SEQ ID NO: 2005 - RNA, 25 nt, Artificial Sequence
  Description of Artificial Sequence: Synthetic oligonucleotide
cacuguuuagguaggguguuaagac

SEQ ID NO: 2006 - RNA, 25 nt, Artificial Sequence
  Description of Artificial Sequence: Synthetic oligonucleotide
cuuacacaguaccucguuucuacac

SEQ ID NO: 2007 - RNA, 25 nt, Artificial Sequence
  Description of Artificial Sequence: Synthetic oligonucleotide
cagagaaagaaauggccauacuuca

SEQ ID NO: 2008 - RNA, 25 nt, Artificial Sequence
  Description of Artificial Sequence: Synthetic oligonucleotide
aggaacugcagugcuuaugagggga

SEQ ID NO: 2009 - RNA, 25 nt, Artificial Sequence
  Description of Artificial Sequence: Synthetic oligonucleotide
auauuuaggccucuugaauuuuuga

SEQ ID NO: 2010 - RNA, 25 nt, Artificial Sequence
  Description of Artificial Sequence: Synthetic oligonucleotide
auguagaugggcauuuuuuuaaggu

SEQ ID NO: 2011 - RNA, 25 nt, Artificial Sequence
  Description of Artificial Sequence: Synthetic oligonucleotide
uagugguuaauuaccuuuaugugaa

SEQ ID NO: 2012 - RNA, 25 nt, Artificial Sequence
  Description of Artificial Sequence: Synthetic oligonucleotide
acuuugaaugguuuaacaaaagauu

SEQ ID NO: 2013 - RNA, 25 nt, Artificial Sequence
  Description of Artificial Sequence: Synthetic oligonucleotide
uuguuuuuguagagauuuuaaaggg

SEQ ID NO: 2014 - RNA, 25 nt, Artificial Sequence
  Description of Artificial Sequence: Synthetic oligonucleotide
gggagaauucuagaaauaaauguua

SEQ ID NO: 2015 - RNA, 25 nt, Artificial Sequence
  Description of Artificial Sequence: Synthetic oligonucleotide
accuaauuauuacagccuuaaagac

SEQ ID NO: 2016 - RNA, 25 nt, Artificial Sequence
  Description of Artificial Sequence: Synthetic oligonucleotide
caaaaauccuuguugaaguuuuuuu

SEQ ID NO: 2017 - RNA, 25 nt, Artificial Sequence
  Description of Artificial Sequence: Synthetic oligonucleotide
uaaaaaaagcuaaauuacauagacu

SEQ ID NO: 2018 - RNA, 25 nt, Artificial Sequence
  Description of Artificial Sequence: Synthetic oligonucleotide
uuaggcauuaacauguuuguggaag

SEQ ID NO: 2019 - RNA, 25 nt, Artificial Sequence
  Description of Artificial Sequence: Synthetic oligonucleotide
gaauauagcagacguauauuguauc

SEQ ID NO: 2020 - RNA, 25 nt, Artificial Sequence
  Description of Artificial Sequence: Synthetic oligonucleotide
cauuugagugaauguucccaaguag

SEQ ID NO: 2021 - RNA, 25 nt, Artificial Sequence
  Description of Artificial Sequence: Synthetic oligonucleotide
ggcauucuaggcucuauuuaacuga

SEQ ID NO: 2022 - RNA, 25 nt, Artificial Sequence
  Description of Artificial Sequence: Synthetic oligonucleotide
agucacacugcauaggaauuuagaa

SEQ ID NO: 2023 - RNA, 25 nt, Artificial Sequence
  Description of Artificial Sequence: Synthetic oligonucleotide
accuaacuuuuauagguuaucaaaa

SEQ ID NO: 2024 - RNA, 25 nt, Artificial Sequence
  Description of Artificial Sequence: Synthetic oligonucleotide
acuguugucaccauugcacaauuuu

SEQ ID NO: 2025 - RNA, 25 nt, Artificial Sequence
  Description of Artificial Sequence: Synthetic oligonucleotide
uguccuaauauauacauagaaacuu

SEQ ID NO: 2026 - RNA, 25 nt, Artificial Sequence
  Description of Artificial Sequence: Synthetic oligonucleotide
uuguggggcauguuaaguuacaguu

SEQ ID NO: 2027 - RNA, 25 nt, Artificial Sequence
  Description of Artificial Sequence: Synthetic oligonucleotide
uugcacaaguucaucucauuuguau

SEQ ID NO: 2028 - RNA, 25 nt, Artificial Sequence
  Description of Artificial Sequence: Synthetic oligonucleotide
aaacauuuuuucuucaaacaguaua

SEQ ID NO: 2029 - RNA, 25 nt, Artificial Sequence
  Description of Artificial Sequence: Synthetic oligonucleotide
auaacuuuuuuuaggggauuuuuuu

SEQ ID NO: 2030 - RNA, 25 nt, Artificial Sequence
  Description of Artificial Sequence: Synthetic oligonucleotide
uuuagacagcaaaaacuaucugaag

SEQ ID NO: 2031 - RNA, 25 nt, Artificial Sequence
  Description of Artificial Sequence: Synthetic oligonucleotide
gauuuccauuugucaaaaaguaaug

SEQ ID NO: 2032 - RNA, 25 nt, Artificial Sequence
  Description of Artificial Sequence: Synthetic oligonucleotide
gauuucuugauaauuguguaguaau

SEQ ID NO: 2033 - RNA, 25 nt, Artificial Sequence
  Description of Artificial Sequence: Synthetic oligonucleotide
uguuuuuuagaacccagcaguuacc

SEQ ID NO: 2034 - RNA, 25 nt, Artificial Sequence
  Description of Artificial Sequence: Synthetic oligonucleotide
cuuaaagcugaauuuauauuuagua

SEQ ID NO: 2035 - RNA, 25 nt, Artificial Sequence
  Description of Artificial Sequence: Synthetic oligonucleotide
aacuucuguguuaauacuggauagc

SEQ ID NO: 2036 - RNA, 25 nt, Artificial Sequence
  Description of Artificial Sequence: Synthetic oligonucleotide
caugaauucugcauugagaaacuga

SEQ ID NO: 2037 - RNA, 25 nt, Artificial Sequence
  Description of Artificial Sequence: Synthetic oligonucleotide
aauagcugucauaaaaugaaacuuu

SEQ ID NO: 2038 - RNA, 25 nt, Artificial Sequence
  Description of Artificial Sequence: Synthetic oligonucleotide
ucuuucuaaagaaagauacucacau

SEQ ID NO: 2039 - RNA, 25 nt, Artificial Sequence
  Description of Artificial Sequence: Synthetic oligonucleotide
ugaguucuugaagaauagucauaac

SEQ ID NO: 2040 - RNA, 25 nt, Artificial Sequence
  Description of Artificial Sequence: Synthetic oligonucleotide
cuagauuaagaucuguguuuuaguu

SEQ ID NO: 2041 - RNA, 25 nt, Artificial Sequence
  Description of Artificial Sequence: Synthetic oligonucleotide
uuaauaguuugaagugccuguuugg

SEQ ID NO: 2042 - RNA, 25 nt, Artificial Sequence
  Description of Artificial Sequence: Synthetic oligonucleotide
ggauaaugauagguaauuuagauga

SEQ ID NO: 2043 - RNA, 25 nt, Artificial Sequence
  Description of Artificial Sequence: Synthetic oligonucleotide
aauuuaggggaaaaaaaaguuaucu

SEQ ID NO: 2044 - RNA, 25 nt, Artificial Sequence
  Description of Artificial Sequence: Synthetic oligonucleotide
ugcagauauguugagggcccaucuc

SEQ ID NO: 2045 - RNA, 25 nt, Artificial Sequence
  Description of Artificial Sequence: Synthetic oligonucleotide
cuccccccacacccccacagagcua

SEQ ID NO: 2046 - RNA, 25 nt, Artificial Sequence
  Description of Artificial Sequence: Synthetic oligonucleotide
aacuggguuacaguguuuuauccga

SEQ ID NO: 2047 - RNA, 25 nt, Artificial Sequence
  Description of Artificial Sequence: Synthetic oligonucleotide
aaaguuuccaauuccacugucuugu

SEQ ID NO: 2048 - RNA, 25 nt, Artificial Sequence
  Description of Artificial Sequence: Synthetic oligonucleotide
uguuuucauguugaaaauacuuuug

SEQ ID NO: 2049 - RNA, 25 nt, Artificial Sequence
  Description of Artificial Sequence: Synthetic oligonucleotide
gcauuuuuccuuugagugccaauuu

SEQ ID NO: 2050 - RNA, 25 nt, Artificial Sequence
  Description of Artificial Sequence: Synthetic oligonucleotide
ucuuacuaguacuauuucuuaaugu

SEQ ID NO: 2051 - RNA, 25 nt, Artificial Sequence
  Description of Artificial Sequence: Synthetic oligonucleotide
uaacauguuuaccuggaauguauuu

SEQ ID NO: 2052 - RNA, 25 nt, Artificial Sequence
  Description of Artificial Sequence: Synthetic oligonucleotide
uuaacuauuuuuguauaguguaaac

SEQ ID NO: 2053 - RNA, 25 nt, Artificial Sequence
  Description of Artificial Sequence: Synthetic oligonucleotide
cugaaacaugcacauuuuguacauu

SEQ ID NO: 2054 - RNA, 25 nt, Artificial Sequence
  Description of Artificial Sequence: Synthetic oligonucleotide
ugugcuuucuuuugugggacauaug

SEQ ID NO: 2055 - RNA, 25 nt, Artificial Sequence
  Description of Artificial Sequence: Synthetic oligonucleotide
gcagugugauccaguuguuuuccau

SEQ ID NO: 2056 - RNA, 25 nt, Artificial Sequence
  Description of Artificial Sequence: Synthetic oligonucleotide
ucauuugguugcgcugaccuaggaa

SEQ ID NO: 2057 - RNA, 25 nt, Artificial Sequence
  Description of Artificial Sequence: Synthetic oligonucleotide
auguuggucauaucaaacauuaaaa

SEQ ID NO: 2058 - RNA, 25 nt, Artificial Sequence
  Description of Artificial Sequence: Synthetic oligonucleotide
aaugaccacucuuuuaauugaaauu

SEQ ID NO: 2059 - RNA, 25 nt, Artificial Sequence
  Description of Artificial Sequence: Synthetic oligonucleotide
uaacuuuuaaauguuuauaggagua

SEQ ID NO: 2060 - RNA, 25 nt, Artificial Sequence
  Description of Artificial Sequence: Synthetic oligonucleotide
augugcugugaagugaucuaaaauu

SEQ ID NO: 2061 - RNA, 25 nt, Artificial Sequence
  Description of Artificial Sequence: Synthetic oligonucleotide
uuguaauauuuuugucaugaacugu

SEQ ID NO: 2062 - RNA, 25 nt, Artificial Sequence
  Description of Artificial Sequence: Synthetic oligonucleotide
uacuacuccuaauuauuguaaugua

SEQ ID NO: 2063 - RNA, 25 nt, Artificial Sequence
  Description of Artificial Sequence: Synthetic oligonucleotide
aauaaaaauaguuacagugacaaaa

SEQ ID NO: 2064 - RNA, 25 nt, Artificial Sequence
  Description of Artificial Sequence: Synthetic oligonucleotide
aagacaggguguugaugaugccuuc

SEQ ID NO: 2065 - RNA, 25 nt, Artificial Sequence
  Description of Artificial Sequence: Synthetic oligonucleotide
cuauacauuaguucgagaaauucga

SEQ ID NO: 2066 - RNA, 25 nt, Artificial Sequence
  Description of Artificial Sequence: Synthetic oligonucleotide
aaaacauaaagaaaagaugagcaaa

SEQ ID NO: 2067 - RNA, 25 nt, Artificial Sequence
  Description of Artificial Sequence: Synthetic oligonucleotide
agaugguaaaaagaagaaaaagaag

SEQ ID NO: 2068 - RNA, 25 nt, Artificial Sequence
  Description of Artificial Sequence: Synthetic oligonucleotide
gucaaagacaaaguguguaauuaug

SEQ ID NO: 2069 - RNA, 25 nt, Artificial Sequence
  Description of Artificial Sequence: Synthetic oligonucleotide
guaaauacaauuuguacuuuuuucu

SEQ ID NO: 2070 - RNA, 25 nt, Artificial Sequence
  Description of Artificial Sequence: Synthetic oligonucleotide
uuaaggcauacuaguacaaguggua

SEQ ID NO: 2071 - RNA, 25 nt, Artificial Sequence
  Description of Artificial Sequence: Synthetic oligonucleotide
aauuuuuguacauuacacuaaauua

SEQ ID NO: 2072 - RNA, 25 nt, Artificial Sequence
  Description of Artificial Sequence: Synthetic oligonucleotide
auuagcauuuguuuuagcauuaccu

SEQ ID NO: 2073 - RNA, 25 nt, Artificial Sequence
  Description of Artificial Sequence: Synthetic oligonucleotide
uaauuuuuuuccugcuccaugcaga

SEQ ID NO: 2074 - RNA, 25 nt, Artificial Sequence
  Description of Artificial Sequence: Synthetic oligonucleotide
acuguuagcuuuuaccuuaaaugcu

SEQ ID NO: 2075 - RNA, 25 nt, Artificial Sequence
  Description of Artificial Sequence: Synthetic oligonucleotide
uuauuuuaaaaugacaguggaaguu

SEQ ID NO: 2076 - RNA, 25 nt, Artificial Sequence
  Description of Artificial Sequence: Synthetic oligonucleotide
uuuuuuuuccucuaagugccaguau

SEQ ID NO: 2077 - RNA, 25 nt, Artificial Sequence
  Description of Artificial Sequence: Synthetic oligonucleotide
uucccagaguuuugguuuuugaacu

SEQ ID NO: 2078 - RNA, 25 nt, Artificial Sequence
  Description of Artificial Sequence: Synthetic oligonucleotide
uagcaaugccugugaaaaagaaacu

SEQ ID NO: 2079 - RNA, 25 nt, Artificial Sequence
  Description of Artificial Sequence: Synthetic oligonucleotide
ugaauaccuaagauuucugucuugg

SEQ ID NO: 2080 - RNA, 25 nt, Artificial Sequence
  Description of Artificial Sequence: Synthetic oligonucleotide
ggguuuuuggugcaugcaguugauu

SEQ ID NO: 2081 - RNA, 25 nt, Artificial Sequence
  Description of Artificial Sequence: Synthetic oligonucleotide
uacuucuuauuuuucuuaccaauug

SEQ ID NO: 2082 - RNA, 25 nt, Artificial Sequence
  Description of Artificial Sequence: Synthetic oligonucleotide
gugaauguuggugugaaacaaauua

SEQ ID NO: 2083 - RNA, 25 nt, Artificial Sequence
  Description of Artificial Sequence: Synthetic oligonucleotide
aaugaagcuuuugaaucaucccuau

SEQ ID NO: 2084 - RNA, 25 nt, Artificial Sequence
  Description of Artificial Sequence: Synthetic oligonucleotide
uucuguguuuuaucuagucacauaa

SEQ ID NO: 2085 - RNA, 25 nt, Artificial Sequence
  Description of Artificial Sequence: Synthetic oligonucleotide
aauggauuaauuacuaauuucaguu

SEQ ID NO: 2086 - RNA, 25 nt, Artificial Sequence
  Description of Artificial Sequence: Synthetic oligonucleotide
ugagaccuucuaauugguuuuuacu

SEQ ID NO: 2087 - RNA, 25 nt, Artificial Sequence
  Description of Artificial Sequence: Synthetic oligonucleotide
ugaaacauugagggaacacaaauuu

SEQ ID NO: 2088 - RNA, 25 nt, Artificial Sequence
  Description of Artificial Sequence: Synthetic oligonucleotide
uaugggcuuccugaugaugauucuu

SEQ ID NO: 2089 - RNA, 25 nt, Artificial Sequence
  Description of Artificial Sequence: Synthetic oligonucleotide
ucuaggcaucauguccuauaguuug

SEQ ID NO: 2090 - RNA, 25 nt, Artificial Sequence
  Description of Artificial Sequence: Synthetic oligonucleotide
gucaucccugaugaauguaaaguua

SEQ ID NO: 2091 - RNA, 25 nt, Artificial Sequence
  Description of Artificial Sequence: Synthetic oligonucleotide
acacuguucacaaagguuuugucuc

SEQ ID NO: 2092 - RNA, 25 nt, Artificial Sequence
  Description of Artificial Sequence: Synthetic oligonucleotide
ccuuuccacugcuauuagucauggu

SEQ ID NO: 2093 - RNA, 25 nt, Artificial Sequence
  Description of Artificial Sequence: Synthetic oligonucleotide
ucacucuccccaaaauauuauauuu

SEQ ID NO: 2094 - RNA, 25 nt, Artificial Sequence
  Description of Artificial Sequence: Synthetic oligonucleotide
uuuucuauaaaaagaaaaaaaugga

SEQ ID NO: 2095 - RNA, 25 nt, Artificial Sequence
  Description of Artificial Sequence: Synthetic oligonucleotide
aaaaaaauuacaaggcaauggaaac

SEQ ID NO: 2096 - RNA, 25 nt, Artificial Sequence
  Description of Artificial Sequence: Synthetic oligonucleotide
cuauuauaaggccauuuccuuuuca

SEQ ID NO: 2097 - RNA, 25 nt, Artificial Sequence
  Description of Artificial Sequence: Synthetic oligonucleotide
acauuagauaaauuacuauaaagac

SEQ ID NO: 2098 - RNA, 25 nt, Artificial Sequence
  Description of Artificial Sequence: Synthetic oligonucleotide
cuccuaauagcuuuuccuguuaagg

SEQ ID NO: 2099 - RNA, 25 nt, Artificial Sequence
  Description of Artificial Sequence: Synthetic oligonucleotide
gcagacccaguaugaaauggggauu

SEQ ID NO: 2100 - RNA, 25 nt, Artificial Sequence
  Description of Artificial Sequence: Synthetic oligonucleotide
uauuauagcaaccauuuuggggcua

SEQ ID NO: 2101 - RNA, 25 nt, Artificial Sequence
  Description of Artificial Sequence: Synthetic oligonucleotide
auauuuacaugcuacuaaauuuuua

SEQ ID NO: 2102 - RNA, 25 nt, Artificial Sequence
  Description of Artificial Sequence: Synthetic oligonucleotide
auaauaauugaaaagauuuuaacaa

SEQ ID NO: 2103 - RNA, 25 nt, Artificial Sequence
  Description of Artificial Sequence: Synthetic oligonucleotide
aguauaaaaaauucucauaggaauu

SEQ ID NO: 2104 - RNA, 25 nt, Artificial Sequence
  Description of Artificial Sequence: Synthetic oligonucleotide
uaaauguagucucccugugucagac

SEQ ID NO: 2105 - RNA, 25 nt, Artificial Sequence
  Description of Artificial Sequence: Synthetic oligonucleotide
cugcucuuucauaguauaacuuuaa

SEQ ID NO: 2106 - RNA, 25 nt, Artificial Sequence
  Description of Artificial Sequence: Synthetic oligonucleotide
aaucuuuucuucaacuugagucuuu

SEQ ID NO: 2107 - RNA, 25 nt, Artificial Sequence
  Description of Artificial Sequence: Synthetic oligonucleotide
ugaagauaguuuuaauucugcuugu

SEQ ID NO: 2108 - RNA, 25 nt, Artificial Sequence
  Description of Artificial Sequence: Synthetic oligonucleotide
ugacauuaaaagauuauuugggcca

SEQ ID NO: 2109 - RNA, 25 nt, Artificial Sequence
  Description of Artificial Sequence: Synthetic oligonucleotide
aguuauagcuuauuagguguugaag

SEQ ID NO: 2110 - RNA, 25 nt, Artificial Sequence
  Description of Artificial Sequence: Synthetic oligonucleotide
gagaccaagguugcaaggccaggcc

SEQ ID NO: 2111 - RNA, 25 nt, Artificial Sequence
  Description of Artificial Sequence: Synthetic oligonucleotide
ccugugugaaccuuugagcuuucau

SEQ ID NO: 2112 - RNA, 25 nt, Artificial Sequence
  Description of Artificial Sequence: Synthetic oligonucleotide
uagagaguuucacagcauggacugu

SEQ ID NO: 2113 - RNA, 25 nt, Artificial Sequence
  Description of Artificial Sequence: Synthetic oligonucleotide
uguccccacggucauccaguguugu

SEQ ID NO: 2114 - RNA, 25 nt, Artificial Sequence
  Description of Artificial Sequence: Synthetic oligonucleotide
ucaugcauugguuagucaaaauggg

SEQ ID NO: 2115 - RNA, 25 nt, Artificial Sequence
  Description of Artificial Sequence: Synthetic oligonucleotide
ggagggacuagggcaguuuggauag

SEQ ID NO: 2116 - RNA, 25 nt, Artificial Sequence
  Description of Artificial Sequence: Synthetic oligonucleotide
gcucaacaagauacaaucucacucu

SEQ ID NO: 2117 - RNA, 25 nt, Artificial Sequence
  Description of Artificial Sequence: Synthetic oligonucleotide
uguggugguccugcugacaaaucaa

SEQ ID NO: 2118 - RNA, 25 nt, Artificial Sequence
  Description of Artificial Sequence: Synthetic oligonucleotide
agagcauugcuuuuguuucuuaaga

SEQ ID NO: 2119 - RNA, 25 nt, Artificial Sequence
  Description of Artificial Sequence: Synthetic oligonucleotide
aaaacaaacucuuuuuuaaaaauua

SEQ ID NO: 2120 - RNA, 25 nt, Artificial Sequence
  Description of Artificial Sequence: Synthetic oligonucleotide
acuuuuaaauauuaacucaaaaguu

SEQ ID NO: 2121 - RNA, 25 nt, Artificial Sequence
  Description of Artificial Sequence: Synthetic oligonucleotide
ugagauuuuggggugguggugugcc

SEQ ID NO: 2122 - RNA, 25 nt, Artificial Sequence
  Description of Artificial Sequence: Synthetic oligonucleotide
caaugaagugaaaaaguuuuacaau

SEQ ID NO: 2123 - RNA, 25 nt, Artificial Sequence
  Description of Artificial Sequence: Synthetic oligonucleotide
ucucuagguuuggcuaguucucuua

SEQ ID NO: 2124 - RNA, 25 nt, Artificial Sequence
  Description of Artificial Sequence: Synthetic oligonucleotide
aacacugguuaaauuaacauugcau

SEQ ID NO: 2125 - RNA, 25 nt, Artificial Sequence
  Description of Artificial Sequence: Synthetic oligonucleotide
uaaacacuuuucaagucugauccau

SEQ ID NO: 2126 - RNA, 25 nt, Artificial Sequence
  Description of Artificial Sequence: Synthetic oligonucleotide
uauuuaauaaugcuuuaaaauaaaa

SEQ ID NO: 2127 - RNA, 25 nt, Artificial Sequence
  Description of Artificial Sequence: Synthetic oligonucleotide
aauaaaaacaauccuuuugauaaau

SEQ ID NO: 2128 - RNA, 25 nt, Artificial Sequence
  Description of Artificial Sequence: Synthetic oligonucleotide
uuuaaaauguuacuuauuuuaaaau

SEQ ID NO: 2129 - RNA, 25 nt, Artificial Sequence
  Description of Artificial Sequence: Synthetic oligonucleotide
uaaaugaagugagauggcaugguga

SEQ ID NO: 2130 - RNA, 25 nt, Artificial Sequence
  Description of Artificial Sequence: Synthetic oligonucleotide
aggugaaaguaucacuggacuagga

SEQ ID NO: 2131 - RNA, 25 nt, Artificial Sequence
  Description of Artificial Sequence: Synthetic oligonucleotide
aagaaggugacuuagguucuagaua

SEQ ID NO: 2132 - RNA, 25 nt, Artificial Sequence
  Description of Artificial Sequence: Synthetic oligonucleotide
aggugucuuuuaggacucugauuuu

SEQ ID NO: 2133 - RNA, 25 nt, Artificial Sequence
  Description of Artificial Sequence: Synthetic oligonucleotide
ugaggacaucacuuacuauccauuu

SEQ ID NO: 2134 - RNA, 25 nt, Artificial Sequence
  Description of Artificial Sequence: Synthetic oligonucleotide
ucuucauguuaaaagaagucaucuc

SEQ ID NO: 2135 - RNA, 25 nt, Artificial Sequence
  Description of Artificial Sequence: Synthetic oligonucleotide
caacuauguaauuuauauuccauuu

SEQ ID NO: 2136 - RNA, 25 nt, Artificial Sequence
  Description of Artificial Sequence: Synthetic oligonucleotide
uacauaaggauacacuuauuuguca

SEQ ID NO: 2137 - RNA, 25 nt, Artificial Sequence
  Description of Artificial Sequence: Synthetic oligonucleotide
aagcucagcacaaucuguaaauuuu

SEQ ID NO: 2138 - RNA, 25 nt, Artificial Sequence
  Description of Artificial Sequence: Synthetic oligonucleotide
uuaaccuauguuacaccaucuucag

SEQ ID NO: 2139 - RNA, 25 nt, Artificial Sequence
  Description of Artificial Sequence: Synthetic oligonucleotide
gugccagucuugggcaaaauugugc

SEQ ID NO: 2140 - RNA, 25 nt, Artificial Sequence
  Description of Artificial Sequence: Synthetic oligonucleotide
caagaggugaaguuuauauuugaau

SEQ ID NO: 2141 - RNA, 25 nt, Artificial Sequence
  Description of Artificial Sequence: Synthetic oligonucleotide
uauccauucucguuuuaggacucuu

SEQ ID NO: 2142 - RNA, 25 nt, Artificial Sequence
  Description of Artificial Sequence: Synthetic oligonucleotide
ucuuccauauuagugucaucuugcc

SEQ ID NO: 2143 - RNA, 25 nt, Artificial Sequence
  Description of Artificial Sequence: Synthetic oligonucleotide
cucccuaccuuccacaugccccaug

SEQ ID NO: 2144 - RNA, 25 nt, Artificial Sequence
  Description of Artificial Sequence: Synthetic oligonucleotide
gacuugaugcaguuuuaauacuugu

SEQ ID NO: 2145 - RNA, 25 nt, Artificial Sequence
  Description of Artificial Sequence: Synthetic oligonucleotide
uaauuccccuaaccauaagauuuac

SEQ ID NO: 2146 - RNA, 25 nt, Artificial Sequence
  Description of Artificial Sequence: Synthetic oligonucleotide
cugcugcuguggauaucuccaugaa

SEQ ID NO: 2147 - RNA, 25 nt, Artificial Sequence
  Description of Artificial Sequence: Synthetic oligonucleotide
aguuuucccacugagucacaucaga

SEQ ID NO: 2148 - RNA, 25 nt, Artificial Sequence
  Description of Artificial Sequence: Synthetic oligonucleotide
aaaugcccuacaucuuauuuccuca

SEQ ID NO: 2149 - RNA, 25 nt, Artificial Sequence
  Description of Artificial Sequence: Synthetic oligonucleotide
agggcucaagagaaucugacagaua

SEQ ID NO: 2150 - RNA, 25 nt, Artificial Sequence
  Description of Artificial Sequence: Synthetic oligonucleotide
accauaaagggauuugaccuaauca

SEQ ID NO: 2151 - RNA, 25 nt, Artificial Sequence
  Description of Artificial Sequence: Synthetic oligonucleotide
acuaauuuucaggugguggcugaug

SEQ ID NO: 2152 - RNA, 25 nt, Artificial Sequence
  Description of Artificial Sequence: Synthetic oligonucleotide
gcuuugaacaucucuuugcugccca

SEQ ID NO: 2153 - RNA, 25 nt, Artificial Sequence
  Description of Artificial Sequence: Synthetic oligonucleotide
aauccauuagcgacaguaggauuuu

SEQ ID NO: 2154 - RNA, 25 nt, Artificial Sequence
  Description of Artificial Sequence: Synthetic oligonucleotide
uucaaaccugguaugaauagacaga

SEQ ID NO: 2155 - RNA, 25 nt, Artificial Sequence
  Description of Artificial Sequence: Synthetic oligonucleotide
aacccuauccaguggaaggagaauu

SEQ ID NO: 2156 - RNA, 25 nt, Artificial Sequence
  Description of Artificial Sequence: Synthetic oligonucleotide
uuaauaaagauagugcugaaagaau

SEQ ID NO: 2157 - RNA, 25 nt, Artificial Sequence
  Description of Artificial Sequence: Synthetic oligonucleotide
uuccuuagguaaucuauaacuagga

SEQ ID NO: 2158 - RNA, 25 nt, Artificial Sequence
  Description of Artificial Sequence: Synthetic oligonucleotide
acuacuccugguaacaguaauacau

SEQ ID NO: 2159 - RNA, 25 nt, Artificial Sequence
  Description of Artificial Sequence: Synthetic oligonucleotide
uuccauuguuuuaguaaccagaaau

SEQ ID NO: 2160 - RNA, 25 nt, Artificial Sequence
  Description of Artificial Sequence: Synthetic oligonucleotide
ucuucaugcaaugaaaaauacuuua

SEQ ID NO: 2161 - RNA, 25 nt, Artificial Sequence
  Description of Artificial Sequence: Synthetic oligonucleotide
aauucaugaagcuuacuuuuuuuuu

SEQ ID NO: 2162 - RNA, 25 nt, Artificial Sequence
  Description of Artificial Sequence: Synthetic oligonucleotide
uuuggugucagagucucgcucuugu

SEQ ID NO: 2163 - RNA, 25 nt, Artificial Sequence
  Description of Artificial Sequence: Synthetic oligonucleotide
ucacccaggcuggaaugcaguggcg

SEQ ID NO: 2164 - RNA, 25 nt, Artificial Sequence
  Description of Artificial Sequence: Synthetic oligonucleotide
gccaucucagcucacugcaaccucc

SEQ ID NO: 2165 - RNA, 25 nt, Artificial Sequence
  Description of Artificial Sequence: Synthetic oligonucleotide
caucucccagguucaagcgauucuc

SEQ ID NO: 2166 - RNA, 25 nt, Artificial Sequence
  Description of Artificial Sequence: Synthetic oligonucleotide
cgugccucggccuccugaguagcug

SEQ ID NO: 2167 - RNA, 25 nt, Artificial Sequence
  Description of Artificial Sequence: Synthetic oligonucleotide
gggauuacaggcgugugccacuaca

SEQ ID NO: 2168 - RNA, 25 nt, Artificial Sequence
  Description of Artificial Sequence: Synthetic oligonucleotide
acucaacuaauuuuuguauuuuuag

SEQ ID NO: 2169 - RNA, 25 nt, Artificial Sequence
  Description of Artificial Sequence: Synthetic oligonucleotide
ggagagacgggguuucacccuguug

SEQ ID NO: 2170 - RNA, 25 nt, Artificial Sequence
  Description of Artificial Sequence: Synthetic oligonucleotide
ggccaggcuggucucgaacuccuga

SEQ ID NO: 2171 - RNA, 25 nt, Artificial Sequence
  Description of Artificial Sequence: Synthetic oligonucleotide
accucaagugauucacccaccuugg

SEQ ID NO: 2172 - RNA, 25 nt, Artificial Sequence
  Description of Artificial Sequence: Synthetic oligonucleotide
gccucauaaaccuguuuugcagaac

SEQ ID NO: 2173 - RNA, 25 nt, Artificial Sequence
  Description of Artificial Sequence: Synthetic oligonucleotide
cucauuuauucagcaaauauuuauu

SEQ ID NO: 2174 - RNA, 25 nt, Artificial Sequence
  Description of Artificial Sequence: Synthetic oligonucleotide
ugagugccuaccagaugccagucac

SEQ ID NO: 2175 - RNA, 25 nt, Artificial Sequence
  Description of Artificial Sequence: Synthetic oligonucleotide
ccgcacaaggcacuggguauauggu

SEQ ID NO: 2176 - RNA, 25 nt, Artificial Sequence
  Description of Artificial Sequence: Synthetic oligonucleotide
uauccccaaacaagagacauaaucc

SEQ ID NO: 2177 - RNA, 25 nt, Artificial Sequence
  Description of Artificial Sequence: Synthetic oligonucleotide
ccgguccuuagguagugcuagugug

SEQ ID NO: 2178 - RNA, 25 nt, Artificial Sequence
  Description of Artificial Sequence: Synthetic oligonucleotide
ggucuguaauaucuuacuaaggccu

SEQ ID NO: 2179 - RNA, 25 nt, Artificial Sequence
  Description of Artificial Sequence: Synthetic oligonucleotide
uuugguauacgacccagagauaaca

SEQ ID NO: 2180 - RNA, 25 nt, Artificial Sequence
  Description of Artificial Sequence: Synthetic oligonucleotide
acgaugcguauuuuaguuuugcaaa

SEQ ID NO: 2181 - RNA, 25 nt, Artificial Sequence
  Description of Artificial Sequence: Synthetic oligonucleotide
agaagggguuuggucucugugccag

SEQ ID NO: 2182 - RNA, 25 nt, Artificial Sequence
  Description of Artificial Sequence: Synthetic oligonucleotide
gcucuauaauuguuuugcuacgauu

SEQ ID NO: 2183 - RNA, 25 nt, Artificial Sequence
  Description of Artificial Sequence: Synthetic oligonucleotide
uccacugaaacucuucgaucaagcu

SEQ ID NO: 2184 - RNA, 25 nt, Artificial Sequence
  Description of Artificial Sequence: Synthetic oligonucleotide
uacuuuauguaaaucacuucauugu

SEQ ID NO: 2185 - RNA, 25 nt, Artificial Sequence
  Description of Artificial Sequence: Synthetic oligonucleotide
uuuuaaaggaauaaacuugauuaua

SEQ ID NO: 2186 - RNA, 25 nt, Artificial Sequence
  Description of Artificial Sequence: Synthetic oligonucleotide
auuguuuuuuuauuuggcauaacug

SEQ ID NO: 2187 - RNA, 25 nt, Artificial Sequence
  Description of Artificial Sequence: Synthetic oligonucleotide
gugauucuuuuaggacaauuacugu

SEQ ID NO: 2188 - RNA, 25 nt, Artificial Sequence
  Description of Artificial Sequence: Synthetic oligonucleotide
uacacauuaagguguaugucagaua

SEQ ID NO: 2189 - RNA, 25 nt, Artificial Sequence
  Description of Artificial Sequence: Synthetic oligonucleotide
auucauauugacccaaauguguaau

SEQ ID NO: 2190 - RNA, 25 nt, Artificial Sequence
  Description of Artificial Sequence: Synthetic oligonucleotide
uauuccaguuuucucugcauaagua

SEQ ID NO: 2191 - RNA, 25 nt, Artificial Sequence
  Description of Artificial Sequence: Synthetic oligonucleotide
aauuaaaauauacuuaaaaauuaau

SEQ ID NO: 2192 - RNA, 25 nt, Artificial Sequence
  Description of Artificial Sequence: Synthetic oligonucleotide
uaguuuuaucuggguacaaauaaac

SEQ ID NO: 2193 - RNA, 25 nt, Artificial Sequence
  Description of Artificial Sequence: Synthetic oligonucleotide
caggugccugaacuaguucacagac

SEQ ID NO: 2194 - RNA, 25 nt, Artificial Sequence
  Description of Artificial Sequence: Synthetic oligonucleotide
caaggaaacuucuauguaaaaauca

SEQ ID NO: 2195 - RNA, 25 nt, Artificial Sequence
  Description of Artificial Sequence: Synthetic oligonucleotide
acuaugauuucugaauugcuaugug

SEQ ID NO: 2196 - RNA, 25 nt, Artificial Sequence
  Description of Artificial Sequence: Synthetic oligonucleotide
gaaacuacagaucuuuggaacacug

SEQ ID NO: 2197 - RNA, 25 nt, Artificial Sequence
  Description of Artificial Sequence: Synthetic oligonucleotide
guuuagguaggguguuaagacuuac

SEQ ID NO: 2198 - RNA, 25 nt, Artificial Sequence
  Description of Artificial Sequence: Synthetic oligonucleotide
cacaguaccucguuucuacacagag

SEQ ID NO: 2199 - RNA, 25 nt, Artificial Sequence
  Description of Artificial Sequence: Synthetic oligonucleotide
gaaagaaauggccauacuucaggaa

SEQ ID NO: 2200 - RNA, 25 nt, Artificial Sequence
  Description of Artificial Sequence: Synthetic oligonucleotide
acugcagugcuuaugaggggauauu

SEQ ID NO: 2201 - RNA, 25 nt, Artificial Sequence
  Description of Artificial Sequence: Synthetic oligonucleotide
uuaggccucuugaauuuuugaugua

SEQ ID NO: 2202 - RNA, 25 nt, Artificial Sequence
  Description of Artificial Sequence: Synthetic oligonucleotide
agaugggcauuuuuuuaagguagug

SEQ ID NO: 2203 - RNA, 25 nt, Artificial Sequence
  Description of Artificial Sequence: Synthetic oligonucleotide
gguuaauuaccuuuaugugaacuuu

SEQ ID NO: 2204 - RNA, 25 nt, Artificial Sequence
  Description of Artificial Sequence: Synthetic oligonucleotide
ugaaugguuuaacaaaagauuuguu

SEQ ID NO: 2205 - RNA, 25 nt, Artificial Sequence
  Description of Artificial Sequence: Synthetic oligonucleotide
uuuuguagagauuuuaaagggggag

SEQ ID NO: 2206 - RNA, 25 nt, Artificial Sequence
  Description of Artificial Sequence: Synthetic oligonucleotide
gaauucuagaaauaaauguuaccua

SEQ ID NO: 2207 - RNA, 25 nt, Artificial Sequence
  Description of Artificial Sequence: Synthetic oligonucleotide
aauuauuacagccuuaaagacaaaa

SEQ ID NO: 2208 - RNA, 25 nt, Artificial Sequence
  Description of Artificial Sequence: Synthetic oligonucleotide
aauccuuguugaaguuuuuuuaaaa

SEQ ID NO: 2209 - RNA, 25 nt, Artificial Sequence
  Description of Artificial Sequence: Synthetic oligonucleotide
aaaagcuaaauuacauagacuuagg

SEQ ID NO: 2210 - RNA, 25 nt, Artificial Sequence
  Description of Artificial Sequence: Synthetic oligonucleotide
gcauuaacauguuuguggaagaaua

SEQ ID NO: 2211 - RNA, 25 nt, Artificial Sequence
  Description of Artificial Sequence: Synthetic oligonucleotide
auagcagacguauauuguaucauuu

SEQ ID NO: 2212 - RNA, 25 nt, Artificial Sequence
  Description of Artificial Sequence: Synthetic oligonucleotide
ugagugaauguucccaaguaggcau

SEQ ID NO: 2213 - RNA, 25 nt, Artificial Sequence
  Description of Artificial Sequence: Synthetic oligonucleotide
uucuaggcucuauuuaacugaguca

SEQ ID NO: 2214 - RNA, 25 nt, Artificial Sequence
  Description of Artificial Sequence: Synthetic oligonucleotide
acacugcauaggaauuuagaaccua

SEQ ID NO: 2215 - RNA, 25 nt, Artificial Sequence
  Description of Artificial Sequence: Synthetic oligonucleotide
aacuuuuauagguuaucaaaacugu

SEQ ID NO: 2216 - RNA, 25 nt, Artificial Sequence
  Description of Artificial Sequence: Synthetic oligonucleotide
uugucaccauugcacaauuuugucc

SEQ ID NO: 2217 - RNA, 25 nt, Artificial Sequence
  Description of Artificial Sequence: Synthetic oligonucleotide
cuaauauauacauagaaacuuugug

SEQ ID NO: 2218 - RNA, 25 nt, Artificial Sequence
  Description of Artificial Sequence: Synthetic oligonucleotide
ggggcauguuaaguuacaguuugca

SEQ ID NO: 2219 - RNA, 25 nt, Artificial Sequence
  Description of Artificial Sequence: Synthetic oligonucleotide
acaaguucaucucauuuguauucca

SEQ ID NO: 2220 - RNA, 25 nt, Artificial Sequence
  Description of Artificial Sequence: Synthetic oligonucleotide
auuuuuucuucaaacaguauauaac

SEQ ID NO: 2221 - RNA, 25 nt, Artificial Sequence
  Description of Artificial Sequence: Synthetic oligonucleotide
cuuuuuuuaggggauuuuuuuuuag

SEQ ID NO: 2222 - RNA, 25 nt, Artificial Sequence
  Description of Artificial Sequence: Synthetic oligonucleotide
gacagcaaaaacuaucugaagauuu

SEQ ID NO: 2223 - RNA, 25 nt, Artificial Sequence
  Description of Artificial Sequence: Synthetic oligonucleotide
uccauuugucaaaaaguaaugauuu

SEQ ID NO: 2224 - RNA, 25 nt, Artificial Sequence
  Description of Artificial Sequence: Synthetic oligonucleotide
ucuugauaauuguguaguaauguuu

SEQ ID NO: 2225 - RNA, 25 nt, Artificial Sequence
  Description of Artificial Sequence: Synthetic oligonucleotide
uuuuagaacccagcaguuaccuuaa

SEQ ID NO: 2226 - RNA, 25 nt, Artificial Sequence
  Description of Artificial Sequence: Synthetic oligonucleotide
aagcugaauuuauauuuaguaacuu

SEQ ID NO: 2227 - RNA, 25 nt, Artificial Sequence
  Description of Artificial Sequence: Synthetic oligonucleotide
ucuguguuaauacuggauagcauga

SEQ ID NO: 2228 - RNA, 25 nt, Artificial Sequence
  Description of Artificial Sequence: Synthetic oligonucleotide
aauucugcauugagaaacugaauag

SEQ ID NO: 2229 - RNA, 25 nt, Artificial Sequence
  Description of Artificial Sequence: Synthetic oligonucleotide
gcugucauaaaaugaaacuuucuuu

SEQ ID NO: 2230 - RNA, 25 nt, Artificial Sequence
  Description of Artificial Sequence: Synthetic oligonucleotide
ucuaaagaaagauacucacaugagu

SEQ ID NO: 2231 - RNA, 25 nt, Artificial Sequence
  Description of Artificial Sequence: Synthetic oligonucleotide
uucuugaagaauagucauaacuaga

SEQ ID NO: 2232 - RNA, 25 nt, Artificial Sequence
  Description of Artificial Sequence: Synthetic oligonucleotide
auuaagaucuguguuuuaguuuaau

SEQ ID NO: 2233 - RNA, 25 nt, Artificial Sequence
  Description of Artificial Sequence: Synthetic oligonucleotide
uaguuugaagugccuguuugggaua

SEQ ID NO: 2234 - RNA, 25 nt, Artificial Sequence
  Description of Artificial Sequence: Synthetic oligonucleotide
aaugauagguaauuuagaugaauuu

SEQ ID NO: 2235 - RNA, 25 nt, Artificial Sequence
  Description of Artificial Sequence: Synthetic oligonucleotide
uaggggaaaaaaaaguuaucugcag

SEQ ID NO: 2236 - RNA, 25 nt, Artificial Sequence
  Description of Artificial Sequence: Synthetic oligonucleotide
gauauguugagggcccaucucuccc

SEQ ID NO: 2237 - RNA, 25 nt, Artificial Sequence
  Description of Artificial Sequence: Synthetic oligonucleotide
ccccacacccccacagagcuaacug

SEQ ID NO: 2238 - RNA, 25 nt, Artificial Sequence
  Description of Artificial Sequence: Synthetic oligonucleotide
ggguuacaguguuuuauccgaaagu

SEQ ID NO: 2239 - RNA, 25 nt, Artificial Sequence
  Description of Artificial Sequence: Synthetic oligonucleotide
uuuccaauuccacugucuuguguuu

SEQ ID NO: 2240 - RNA, 25 nt, Artificial Sequence
  Description of Artificial Sequence: Synthetic oligonucleotide
uucauguugaaaauacuuuugcauu

SEQ ID NO: 2241 - RNA, 25 nt, Artificial Sequence
  Description of Artificial Sequence: Synthetic oligonucleotide
uuuuccuuugagugccaauuucuua

SEQ ID NO: 2242 - RNA, 25 nt, Artificial Sequence
  Description of Artificial Sequence: Synthetic oligonucleotide
acuaguacuauuucuuaauguaaca

SEQ ID NO: 2243 - RNA, 25 nt, Artificial Sequence
  Description of Artificial Sequence: Synthetic oligonucleotide
auguuuaccuggaauguauuuuaac

SEQ ID NO: 2244 - RNA, 25 nt, Artificial Sequence
  Description of Artificial Sequence: Synthetic oligonucleotide
cuauuuuuguauaguguaaacugaa

SEQ ID NO: 2245 - RNA, 25 nt, Artificial Sequence
  Description of Artificial Sequence: Synthetic oligonucleotide
aacaugcacauuuuguacauugugc

SEQ ID NO: 2246 - RNA, 25 nt, Artificial Sequence
  Description of Artificial Sequence: Synthetic oligonucleotide
cuuucuuuugugggacauaugcagu

SEQ ID NO: 2247 - RNA, 25 nt, Artificial Sequence
  Description of Artificial Sequence: Synthetic oligonucleotide
ugugauccaguuguuuuccaucauu

SEQ ID NO: 2248 - RNA, 25 nt, Artificial Sequence
  Description of Artificial Sequence: Synthetic oligonucleotide
uugguugcgcugaccuaggaauguu

SEQ ID NO: 2249 - RNA, 25 nt, Artificial Sequence
  Description of Artificial Sequence: Synthetic oligonucleotide
uggucauaucaaacauuaaaaauga

SEQ ID NO: 2250 - RNA, 25 nt, Artificial Sequence
  Description of Artificial Sequence: Synthetic oligonucleotide
accacucuuuuaauugaaauuaacu

SEQ ID NO: 2251 - RNA, 25 nt, Artificial Sequence
  Description of Artificial Sequence: Synthetic oligonucleotide
uuuuaaauguuuauaggaguaugug

SEQ ID NO: 2252 - RNA, 25 nt, Artificial Sequence
  Description of Artificial Sequence: Synthetic oligonucleotide
gcugugaagugaucuaaaauuugua

SEQ ID NO: 2253 - RNA, 25 nt, Artificial Sequence
  Description of Artificial Sequence: Synthetic oligonucleotide
aauauuuuugucaugaacuguacua

SEQ ID NO: 2254 - RNA, 25 nt, Artificial Sequence
  Description of Artificial Sequence: Synthetic oligonucleotide
acuccuaauuauuguaauguaauaa

SEQ ID NO: 2255 - RNA, 25 nt, Artificial Sequence
  Description of Artificial Sequence: Synthetic oligonucleotide
aaaauaguuacagugacaaaaaaaa

SEQ ID NO: 2256 - RNA, 1963 nt, Homo sapiens
gaaacgucccgugugggaggggcgggucugggugcggcugccgcaugacucgugguucggaggcccacguggccggggcggggacucaggcgccuggcagccgacugauuacguagcgggcggggccggaagugccgcuccuuggugggggcuguucauggcgguuccggggucuccaacauuuuucccggucugugguccuaaaucuguccaaagcagaggcaguggagcuugagguucuugcuggugugaaaugacugaguacaaacugguggugguuggagcaggugguguugggaaaagcgcacugacaauccagcuaauccagaaccacuuuguagaugaauaugaucccaccauagaggauucuuacagaaaacaagugguuauagauggugaaaccuguuuguuggacauacuggauacagcuggacaagaagaguacagugccaugagagaccaauacaugaggacaggcgaaggcuuccucuguguauuugccaucaauaauagcaagucauuugcggauauuaaccucuacagggagcagauuaagcgaguaaaagacucggaugauguaccuauggugcuagugggaaacaagugugauuugccaacaaggacaguugauacaaaacaagcccacgaacuggccaagaguuacgggauuccauucauugaaaccucagccaagaccagacaggguguugaagaugcuuuuuacacacugguaagagaaauacgccaguaccgaaugaaaaaacucaacagcagugaugaugggacucaggguuguaugggauugccauguguggugauguaacaagauacuuuuaaaguuuugucagaaaagagccacuuucaagcugcacugacacccugguccugacuuccuggaggagaaguauuccuguugcugucuucagucucacagagaagcuccugcuacuuccccagcucucaguaguuuaguacaauaaucucuauuugagaaguucucagaauaacuaccuccucacuuggcugucugaccagagaaugcaccucuuguuacucccuguuauuuuucugcccuggguucuuccacagcacaaacacaccucaacacaccucugccaccccagguuuuucaucugaaaagcaguucaugucugaaacagagaaccaaaccgcaaacgugaaauucuauugaaaacagugucuugagcucuaaaguagcaacugcuggugauuuuuuuuuucuuuuuacuguugaacuuagaacuaugccuaauuuuuggagaaaugucauaaauuacuguuuugccaagaauauaguuauuauugcuguuugguuuguuuauaauguuaucggcucuauucucuaaacuggcaucugcucuagauucauaaauacaaaaaugaauacugaauuuugagucuauccuagucuucacaacuuugacguaauuaaauccaacuuuucacagugaagugccuuuuuccuagaagugguuuguagacuccuuuauaauauuucaguggaauagaugucucaaaaauccuuaugcaugaaaugaaugucugagauacgucugugacuuaucuaccauugaaggaaagcuauaucuauuugagagcagaugccauuuuguacauguaugaaauugguuuuccagaggccuguuuuggggcuuucccaggagaaagaugaaacugaaagcauaugaauaauuucacuuaauaauuuuuaccuaaucuccacuuuuuucauagguuacuaccuauacaauguauguaauuuguuuccccuagcuuacugauaaaccuaauauucaaugaacuuccauuuguauucaaauuugugucauaccagaaagcucuacauuugcagauguucaaauauuguaaaacuuuggugcauuguuauuuaauagcugugaucagugauuuucaaaccucaaauauaguauauuaacaaauu

SEQ ID NO: 2257 - RNA, 19 nt, Artificial Sequence
  Description of Artificial Sequence: Synthetic oligonucleotide
gaaacgucccgugugggag

SEQ ID NO: 2258 - RNA, 19 nt, Artificial Sequence
  Description of Artificial Sequence: Synthetic oligonucleotide
ggggcgggucugggugcgg

SEQ ID NO: 2259 - RNA, 19 nt, Artificial Sequence
  Description of Artificial Sequence: Synthetic oligonucleotide
gcugccgcaugacucgugg

SEQ ID NO: 2260 - RNA, 19 nt, Artificial Sequence
  Description of Artificial Sequence: Synthetic oligonucleotide
guucggaggcccacguggc

SEQ ID NO: 2261 - RNA, 19 nt, Artificial Sequence
  Description of Artificial Sequence: Synthetic oligonucleotide
ccggggcggggacucaggc

SEQ ID NO: 2262 - RNA, 19 nt, Artificial Sequence
  Description of Artificial Sequence: Synthetic oligonucleotide
cgccuggcagccgacugau

SEQ ID NO: 2263 - RNA, 19 nt, Artificial Sequence
  Description of Artificial Sequence: Synthetic oligonucleotide
uuacguagcgggcggggcc

SEQ ID NO: 2264 - RNA, 19 nt, Artificial Sequence
  Description of Artificial Sequence: Synthetic oligonucleotide
cggaagugccgcuccuugg

SEQ ID NO: 2265 - RNA, 19 nt, Artificial Sequence
  Description of Artificial Sequence: Synthetic oligonucleotide
gugggggcuguucauggcg

SEQ ID NO: 2266 - RNA, 19 nt, Artificial Sequence
  Description of Artificial Sequence: Synthetic oligonucleotide
gguuccggggucuccaaca

SEQ ID NO: 2267 - RNA, 19 nt, Artificial Sequence
  Description of Artificial Sequence: Synthetic oligonucleotide
auuuuucccggucuguggu

SEQ ID NO: 2268 - RNA, 19 nt, Artificial Sequence
  Description of Artificial Sequence: Synthetic oligonucleotide
uccuaaaucuguccaaagc

SEQ ID NO: 2269 - RNA, 19 nt, Artificial Sequence
  Description of Artificial Sequence: Synthetic oligonucleotide
cagaggcaguggagcuuga

SEQ ID NO: 2270 - RNA, 19 nt, Artificial Sequence
  Description of Artificial Sequence: Synthetic oligonucleotide
agguucuugcuggugugaa

SEQ ID NO: 2271 - RNA, 19 nt, Artificial Sequence
  Description of Artificial Sequence: Synthetic oligonucleotide
aaugacugaguacaaacug

SEQ ID NO: 2272 - RNA, 19 nt, Artificial Sequence
  Description of Artificial Sequence: Synthetic oligonucleotide
gguggugguuggagcaggu

SEQ ID NO: 2273 - RNA, 19 nt, Artificial Sequence
  Description of Artificial Sequence: Synthetic oligonucleotide
ugguguugggaaaagcgca

SEQ ID NO: 2274 - RNA, 19 nt, Artificial Sequence
  Description of Artificial Sequence: Synthetic oligonucleotide
acugacaauccagcuaauc

SEQ ID NO: 2275 - RNA, 19 nt, Artificial Sequence
  Description of Artificial Sequence: Synthetic oligonucleotide
ccagaaccacuuuguagau

SEQ ID NO: 2276 - RNA, 19 nt, Artificial Sequence
  Description of Artificial Sequence: Synthetic oligonucleotide
ugaauaugaucccaccaua

SEQ ID NO: 2277 - RNA, 19 nt, Artificial Sequence
  Description of Artificial Sequence: Synthetic oligonucleotide
agaggauucuuacagaaaa

SEQ ID NO: 2278 - RNA, 19 nt, Artificial Sequence
  Description of Artificial Sequence: Synthetic oligonucleotide
acaagugguuauagauggu

SEQ ID NO: 2279 - RNA, 19 nt, Artificial Sequence
  Description of Artificial Sequence: Synthetic oligonucleotide
ugaaaccuguuuguuggac

SEQ ID NO: 2280 - RNA, 19 nt, Artificial Sequence
  Description of Artificial Sequence: Synthetic oligonucleotide
cauacuggauacagcugga

SEQ ID NO: 2281 - RNA, 19 nt, Artificial Sequence
  Description of Artificial Sequence: Synthetic oligonucleotide
acaagaagaguacagugcc

SEQ ID NO: 2282 - RNA, 19 nt, Artificial Sequence
  Description of Artificial Sequence: Synthetic oligonucleotide
caugagagaccaauacaug

SEQ ID NO: 2283 - RNA, 19 nt, Artificial Sequence
  Description of Artificial Sequence: Synthetic oligonucleotide
gaggacaggcgaaggcuuc

SEQ ID NO: 2284 - RNA, 19 nt, Artificial Sequence
  Description of Artificial Sequence: Synthetic oligonucleotide
ccucuguguauuugccauc

SEQ ID NO: 2285 - RNA, 19 nt, Artificial Sequence
  Description of Artificial Sequence: Synthetic oligonucleotide
caauaauagcaagucauuu

SEQ ID NO: 2286 - RNA, 19 nt, Artificial Sequence
  Description of Artificial Sequence: Synthetic oligonucleotide
ugcggauauuaaccucuac

SEQ ID NO: 2287 - RNA, 19 nt, Artificial Sequence
  Description of Artificial Sequence: Synthetic oligonucleotide
cagggagcagauuaagcga

SEQ ID NO: 2288 - RNA, 19 nt, Artificial Sequence
  Description of Artificial Sequence: Synthetic oligonucleotide
aguaaaagacucggaugau

SEQ ID NO: 2289 - RNA, 19 nt, Artificial Sequence
  Description of Artificial Sequence: Synthetic oligonucleotide
uguaccuauggugcuagug

SEQ ID NO: 2290 - RNA, 19 nt, Artificial Sequence
  Description of Artificial Sequence: Synthetic oligonucleotide
gggaaacaagugugauuug

SEQ ID NO: 2291 - RNA, 19 nt, Artificial Sequence
  Description of Artificial Sequence: Synthetic oligonucleotide
gccaacaaggacaguugau

SEQ ID NO: 2292 - RNA, 19 nt, Artificial Sequence
  Description of Artificial Sequence: Synthetic oligonucleotide
uacaaaacaagcccacgaa

SEQ ID NO: 2293 - RNA, 19 nt, Artificial Sequence
  Description of Artificial Sequence: Synthetic oligonucleotide
acuggccaagaguuacggg

SEQ ID NO: 2294 - RNA, 19 nt, Artificial Sequence
  Description of Artificial Sequence: Synthetic oligonucleotide
gauuccauucauugaaacc

SEQ ID NO: 2295 - RNA, 19 nt, Artificial Sequence
  Description of Artificial Sequence: Synthetic oligonucleotide
cucagccaagaccagacag

SEQ ID NO: 2296 - RNA, 19 nt, Artificial Sequence
  Description of Artificial Sequence: Synthetic oligonucleotide
ggguguugaagaugcuuuu

SEQ ID NO: 2297 - RNA, 19 nt, Artificial Sequence
  Description of Artificial Sequence: Synthetic oligonucleotide
uuacacacugguaagagaa

SEQ ID NO: 2298 - RNA, 19 nt, Artificial Sequence
  Description of Artificial Sequence: Synthetic oligonucleotide
aauacgccaguaccgaaug

SEQ ID NO: 2299 - RNA, 19 nt, Artificial Sequence
  Description of Artificial Sequence: Synthetic oligonucleotide
gaaaaaacucaacagcagu

SEQ ID NO: 2300 - RNA, 19 nt, Artificial Sequence
  Description of Artificial Sequence: Synthetic oligonucleotide
ugaugaugggacucagggu

SEQ ID NO: 2301 - RNA, 19 nt, Artificial Sequence
  Description of Artificial Sequence: Synthetic oligonucleotide
uuguaugggauugccaugu

SEQ ID NO: 2302 - RNA, 19 nt, Artificial Sequence
  Description of Artificial Sequence: Synthetic oligonucleotide
uguggugauguaacaagau

SEQ ID NO: 2303 - RNA, 19 nt, Artificial Sequence
  Description of Artificial Sequence: Synthetic oligonucleotide
uacuuuuaaaguuuuguca

SEQ ID NO: 2304 - RNA, 19 nt, Artificial Sequence
  Description of Artificial Sequence: Synthetic oligonucleotide
agaaaagagccacuuucaa

SEQ ID NO: 2305 - RNA, 19 nt, Artificial Sequence
  Description of Artificial Sequence: Synthetic oligonucleotide
agcugcacugacacccugg

SEQ ID NO: 2306 - RNA, 19 nt, Artificial Sequence
  Description of Artificial Sequence: Synthetic oligonucleotide
guccugacuuccuggagga

SEQ ID NO: 2307 - RNA, 19 nt, Artificial Sequence
  Description of Artificial Sequence: Synthetic oligonucleotide
agaaguauuccuguugcug

SEQ ID NO: 2308 - RNA, 19 nt, Artificial Sequence
  Description of Artificial Sequence: Synthetic oligonucleotide
gucuucagucucacagaga

SEQ ID NO: 2309 - RNA, 19 nt, Artificial Sequence
  Description of Artificial Sequence: Synthetic oligonucleotide
aagcuccugcuacuucccc

SEQ ID NO: 2310 - RNA, 19 nt, Artificial Sequence
  Description of Artificial Sequence: Synthetic oligonucleotide
cagcucucaguaguuuagu

SEQ ID NO: 2311 - RNA, 19 nt, Artificial Sequence
  Description of Artificial Sequence: Synthetic oligonucleotide
uacaauaaucucuauuuga

SEQ ID NO: 2312 - RNA, 19 nt, Artificial Sequence
  Description of Artificial Sequence: Synthetic oligonucleotide
agaaguucucagaauaacu

SEQ ID NO: 2313 - RNA, 19 nt, Artificial Sequence
  Description of Artificial Sequence: Synthetic oligonucleotide
uaccuccucacuuggcugu

SEQ ID NO: 2314 - RNA, 19 nt, Artificial Sequence
  Description of Artificial Sequence: Synthetic oligonucleotide
ucugaccagagaaugcacc

SEQ ID NO: 2315 - RNA, 19 nt, Artificial Sequence
  Description of Artificial Sequence: Synthetic oligonucleotide
cucuuguuacucccuguua

SEQ ID NO: 2316 - RNA, 19 nt, Artificial Sequence
  Description of Artificial Sequence: Synthetic oligonucleotide
auuuuucugcccuggguuc

SEQ ID NO: 2317 - RNA, 19 nt, Artificial Sequence
  Description of Artificial Sequence: Synthetic oligonucleotide
cuuccacagcacaaacaca

SEQ ID NO: 2318 - RNA, 19 nt, Artificial Sequence
  Description of Artificial Sequence: Synthetic oligonucleotide
accucaacacaccucugcc

SEQ ID NO: 2319 - RNA, 19 nt, Artificial Sequence
  Description of Artificial Sequence: Synthetic oligonucleotide
caccccagguuuuucaucu

SEQ ID NO: 2320 - RNA, 19 nt, Artificial Sequence
  Description of Artificial Sequence: Synthetic oligonucleotide
ugaaaagcaguucaugucu

SEQ ID NO: 2321 - RNA, 19 nt, Artificial Sequence
  Description of Artificial Sequence: Synthetic oligonucleotide
ugaaacagagaaccaaacc

SEQ ID NO: 2322 - RNA, 19 nt, Artificial Sequence
  Description of Artificial Sequence: Synthetic oligonucleotide
cgcaaacgugaaauucuau

SEQ ID NO: 2323 - RNA, 19 nt, Artificial Sequence
  Description of Artificial Sequence: Synthetic oligonucleotide
uugaaaacagugucuugag

SEQ ID NO: 2324 - RNA, 19 nt, Artificial Sequence
  Description of Artificial Sequence: Synthetic oligonucleotide
gcucuaaaguagcaacugc

SEQ ID NO: 2325 - RNA, 19 nt, Artificial Sequence
  Description of Artificial Sequence: Synthetic oligonucleotide
uuuuuacuguugaacuuag

SEQ ID NO: 2326 - RNA, 19 nt, Artificial Sequence
  Description of Artificial Sequence: Synthetic oligonucleotide
gaacuaugccuaauuuuug

SEQ ID NO: 2327 - RNA, 19 nt, Artificial Sequence
  Description of Artificial Sequence: Synthetic oligonucleotide
ggagaaaugucauaaauua

SEQ ID NO: 2328 - RNA, 19 nt, Artificial Sequence
  Description of Artificial Sequence: Synthetic oligonucleotide
acuguuuugccaagaauau

SEQ ID NO: 2329 - RNA, 19 nt, Artificial Sequence
  Description of Artificial Sequence: Synthetic oligonucleotide
uaguuauuauugcuguuug

SEQ ID NO: 2330 - RNA, 19 nt, Artificial Sequence
  Description of Artificial Sequence: Synthetic oligonucleotide
gguuuguuuauaauguuau

SEQ ID NO: 2331 - RNA, 19 nt, Artificial Sequence
  Description of Artificial Sequence: Synthetic oligonucleotide
ucggcucuauucucuaaac

SEQ ID NO: 2332 - RNA, 19 nt, Artificial Sequence
  Description of Artificial Sequence: Synthetic oligonucleotide
cuggcaucugcucuagauu

SEQ ID NO: 2333 - RNA, 19 nt, Artificial Sequence
  Description of Artificial Sequence: Synthetic oligonucleotide
ucauaaauacaaaaaugaa

SEQ ID NO: 2334 - RNA, 19 nt, Artificial Sequence
  Description of Artificial Sequence: Synthetic oligonucleotide
auacugaauuuugagucua

SEQ ID NO: 2335 - RNA, 19 nt, Artificial Sequence
  Description of Artificial Sequence: Synthetic oligonucleotide
auccuagucuucacaacuu

SEQ ID NO: 2336 - RNA, 19 nt, Artificial Sequence
  Description of Artificial Sequence: Synthetic oligonucleotide
uugacguaauuaaauccaa

SEQ ID NO: 2337 - RNA, 19 nt, Artificial Sequence
  Description of Artificial Sequence: Synthetic oligonucleotide
acuuuucacagugaagugc

SEQ ID NO: 2338 - RNA, 19 nt, Artificial Sequence
  Description of Artificial Sequence: Synthetic oligonucleotide
ccuuuuuccuagaaguggu

SEQ ID NO: 2339 - RNA, 19 nt, Artificial Sequence
  Description of Artificial Sequence: Synthetic oligonucleotide
uuuguagacuccuuuauaa

SEQ ID NO: 2340 - RNA, 19 nt, Artificial Sequence
  Description of Artificial Sequence: Synthetic oligonucleotide
auauuucaguggaauagau

SEQ ID NO: 2341 - RNA, 19 nt, Artificial Sequence
  Description of Artificial Sequence: Synthetic oligonucleotide
ugucucaaaaauccuuaug

SEQ ID NO: 2342 - RNA, 19 nt, Artificial Sequence
  Description of Artificial Sequence: Synthetic oligonucleotide
gcaugaaaugaaugucuga

SEQ ID NO: 2343 - RNA, 19 nt, Artificial Sequence
  Description of Artificial Sequence: Synthetic oligonucleotide
agauacgucugugacuuau

SEQ ID NO: 2344 - RNA, 19 nt, Artificial Sequence
  Description of Artificial Sequence: Synthetic oligonucleotide
ucuaccauugaaggaaagc

SEQ ID NO: 2345 - RNA, 19 nt, Artificial Sequence
  Description of Artificial Sequence: Synthetic oligonucleotide
cuauaucuauuugagagca

SEQ ID NO: 2346 - RNA, 19 nt, Artificial Sequence
  Description of Artificial Sequence: Synthetic oligonucleotide
agaugccauuuuguacaug

SEQ ID NO: 2347 - RNA, 19 nt, Artificial Sequence
  Description of Artificial Sequence: Synthetic oligonucleotide
guaugaaauugguuuucca

SEQ ID NO: 2348 - RNA, 19 nt, Artificial Sequence
  Description of Artificial Sequence: Synthetic oligonucleotide
agaggccuguuuuggggcu

SEQ ID NO: 2349 - RNA, 19 nt, Artificial Sequence
  Description of Artificial Sequence: Synthetic oligonucleotide
uuucccaggagaaagauga

SEQ ID NO: 2350 - RNA, 19 nt, Artificial Sequence
  Description of Artificial Sequence: Synthetic oligonucleotide
aaacugaaagcauaugaau

SEQ ID NO: 2351 - RNA, 19 nt, Artificial Sequence
  Description of Artificial Sequence: Synthetic oligonucleotide
uaauuucacuuaauaauuu

SEQ ID NO: 2352 - RNA, 19 nt, Artificial Sequence
  Description of Artificial Sequence: Synthetic oligonucleotide
uuuaccuaaucuccacuuu

SEQ ID NO: 2353 - RNA, 19 nt, Artificial Sequence
  Description of Artificial Sequence: Synthetic oligonucleotide
uuuucauagguuacuaccu

SEQ ID NO: 2354 - RNA, 19 nt, Artificial Sequence
  Description of Artificial Sequence: Synthetic oligonucleotide
uauacaauguauguaauuu

SEQ ID NO: 2355 - RNA, 19 nt, Artificial Sequence
  Description of Artificial Sequence: Synthetic oligonucleotide
uguuuccccuagcuuacug

SEQ ID NO: 2356 - RNA, 19 nt, Artificial Sequence
  Description of Artificial Sequence: Synthetic oligonucleotide
gauaaaccuaauauucaau

SEQ ID NO: 2357 - RNA, 19 nt, Artificial Sequence
  Description of Artificial Sequence: Synthetic oligonucleotide
ugaacuuccauuuguauuc

SEQ ID NO: 2358 - RNA, 19 nt, Artificial Sequence
  Description of Artificial Sequence: Synthetic oligonucleotide
caaauuugugucauaccag

SEQ ID NO: 2359 - RNA, 19 nt, Artificial Sequence
  Description of Artificial Sequence: Synthetic oligonucleotide
gaaagcucuacauuugcag

SEQ ID NO: 2360 - RNA, 19 nt, Artificial Sequence
  Description of Artificial Sequence: Synthetic oligonucleotide
gauguucaaauauuguaaa

SEQ ID NO: 2361 - RNA, 19 nt, Artificial Sequence
  Description of Artificial Sequence: Synthetic oligonucleotide
aacuuuggugcauuguuau

SEQ ID NO: 2362 - RNA, 19 nt, Artificial Sequence
  Description of Artificial Sequence: Synthetic oligonucleotide
uuuaauagcugugaucagu

SEQ ID NO: 2363 - RNA, 19 nt, Artificial Sequence
  Description of Artificial Sequence: Synthetic oligonucleotide
ugauuuucaaaccucaaau

SEQ ID NO: 2364 - RNA, 19 nt, Artificial Sequence
  Description of Artificial Sequence: Synthetic oligonucleotide
uauaguauauuaacaaauu

SEQ ID NO: 2365 - RNA, 25 nt, Artificial Sequence
  Description of Artificial Sequence: Synthetic oligonucleotide
gaaacgucccgugugggaggggcgg

SEQ ID NO: 2366 - RNA, 25 nt, Artificial Sequence
  Description of Artificial Sequence: Synthetic oligonucleotide
ggucugggugcggcugccgcaugac

SEQ ID NO: 2367 - RNA, 25 nt, Artificial Sequence
  Description of Artificial Sequence: Synthetic oligonucleotide
cucgugguucggaggcccacguggc

SEQ ID NO: 2368 - RNA, 25 nt, Artificial Sequence
  Description of Artificial Sequence: Synthetic oligonucleotide
ccggggcggggacucaggcgccugg

SEQ ID NO: 2369 - RNA, 25 nt, Artificial Sequence
  Description of Artificial Sequence: Synthetic oligonucleotide
gcagccgacugauuacguagcgggc

SEQ ID NO: 2370 - RNA, 25 nt, Artificial Sequence
  Description of Artificial Sequence: Synthetic oligonucleotide
cggggccggaagugccgcuccuugg

SEQ ID NO: 2371 - RNA, 25 nt, Artificial Sequence
  Description of Artificial Sequence: Synthetic oligonucleotide
gugggggcuguucauggcgguuccg

SEQ ID NO: 2372 - RNA, 25 nt, Artificial Sequence
  Description of Artificial Sequence: Synthetic oligonucleotide
ggggucuccaacauuuuucccgguc

SEQ ID NO: 2373 - RNA, 25 nt, Artificial Sequence
  Description of Artificial Sequence: Synthetic oligonucleotide
cugugguccuaaaucuguccaaagc

SEQ ID NO: 2374 - RNA, 25 nt, Artificial Sequence
  Description of Artificial Sequence: Synthetic oligonucleotide
cagaggcaguggagcuugagguucu

SEQ ID NO: 2375 - RNA, 25 nt, Artificial Sequence
  Description of Artificial Sequence: Synthetic oligonucleotide
uugcuggugugaaaugacugaguac

SEQ ID NO: 2376 - RNA, 25 nt, Artificial Sequence
  Description of Artificial Sequence: Synthetic oligonucleotide
caaacugguggugguuggagcaggu

SEQ ID NO: 2377 - RNA, 25 nt, Artificial Sequence
  Description of Artificial Sequence: Synthetic oligonucleotide
ugguguugggaaaagcgcacugaca

SEQ ID NO: 2378 - RNA, 25 nt, Artificial Sequence
  Description of Artificial Sequence: Synthetic oligonucleotide
aauccagcuaauccagaaccacuuu

SEQ ID NO: 2379 - RNA, 25 nt, Artificial Sequence
  Description of Artificial Sequence: Synthetic oligonucleotide
uguagaugaauaugaucccaccaua

SEQ ID NO: 2380 - RNA, 25 nt, Artificial Sequence
  Description of Artificial Sequence: Synthetic oligonucleotide
agaggauucuuacagaaaacaagug

SEQ ID NO: 2381 - RNA, 25 nt, Artificial Sequence
  Description of Artificial Sequence: Synthetic oligonucleotide
gguuauagauggugaaaccuguuug

SEQ ID NO: 2382 - RNA, 25 nt, Artificial Sequence
  Description of Artificial Sequence: Synthetic oligonucleotide
guuggacauacuggauacagcugga

SEQ ID NO: 2383 - RNA, 25 nt, Artificial Sequence
  Description of Artificial Sequence: Synthetic oligonucleotide
acaagaagaguacagugccaugaga

SEQ ID NO: 2384 - RNA, 25 nt, Artificial Sequence
  Description of Artificial Sequence: Synthetic oligonucleotide
agaccaauacaugaggacaggcgaa

SEQ ID NO: 2385 - RNA, 25 nt, Artificial Sequence
  Description of Artificial Sequence: Synthetic oligonucleotide
aggcuuccucuguguauuugccauc

SEQ ID NO: 2386 - RNA, 25 nt, Artificial Sequence
  Description of Artificial Sequence: Synthetic oligonucleotide
caauaauagcaagucauuugcggau

SEQ ID NO: 2387 - RNA, 25 nt, Artificial Sequence
  Description of Artificial Sequence: Synthetic oligonucleotide
uauuaaccucuacagggagcagauu

SEQ ID NO: 2388 - RNA, 25 nt, Artificial Sequence
  Description of Artificial Sequence: Synthetic oligonucleotide
uaagcgaguaaaagacucggaugau

SEQ ID NO: 2389 - RNA, 25 nt, Artificial Sequence
  Description of Artificial Sequence: Synthetic oligonucleotide
uguaccuauggugcuagugggaaac

SEQ ID NO: 2390 - RNA, 25 nt, Artificial Sequence
  Description of Artificial Sequence: Synthetic oligonucleotide
caagugugauuugccaacaaggaca

SEQ ID NO: 2391 - RNA, 25 nt, Artificial Sequence
  Description of Artificial Sequence: Synthetic oligonucleotide
aguugauacaaaacaagcccacgaa

SEQ ID NO: 2392 - RNA, 25 nt, Artificial Sequence
  Description of Artificial Sequence: Synthetic oligonucleotide
acuggccaagaguuacgggauucca

SEQ ID NO: 2393 - RNA, 25 nt, Artificial Sequence
  Description of Artificial Sequence: Synthetic oligonucleotide
auucauugaaaccucagccaagacc

SEQ ID NO: 2394 - RNA, 25 nt, Artificial Sequence
  Description of Artificial Sequence: Synthetic oligonucleotide
cagacaggguguugaagaugcuuuu

SEQ ID NO: 2395 - RNA, 25 nt, Artificial Sequence
  Description of Artificial Sequence: Synthetic oligonucleotide
uuacacacugguaagagaaauacgc

SEQ ID NO: 2396 - RNA, 25 nt, Artificial Sequence
  Description of Artificial Sequence: Synthetic oligonucleotide
ccaguaccgaaugaaaaaacucaac

SEQ ID NO: 2397 - RNA, 25 nt, Artificial Sequence
  Description of Artificial Sequence: Synthetic oligonucleotide
cagcagugaugaugggacucagggu

SEQ ID NO: 2398 - RNA, 25 nt, Artificial Sequence
  Description of Artificial Sequence: Synthetic oligonucleotide
uuguaugggauugccauguguggug

SEQ ID NO: 2399 - RNA, 25 nt, Artificial Sequence
  Description of Artificial Sequence: Synthetic oligonucleotide
gauguaacaagauacuuuuaaaguu

SEQ ID NO: 2400 - RNA, 25 nt, Artificial Sequence
  Description of Artificial Sequence: Synthetic oligonucleotide
uuugucagaaaagagccacuuucaa

SEQ ID NO: 2401 - RNA, 25 nt, Artificial Sequence
  Description of Artificial Sequence: Synthetic oligonucleotide
agcugcacugacacccugguccuga

SEQ ID NO: 2402 - RNA, 25 nt, Artificial Sequence
  Description of Artificial Sequence: Synthetic oligonucleotide
acuuccuggaggagaaguauuccug

SEQ ID NO: 2403 - RNA, 25 nt, Artificial Sequence
  Description of Artificial Sequence: Synthetic oligonucleotide
guugcugucuucagucucacagaga

SEQ ID NO: 2404 - RNA, 25 nt, Artificial Sequence
  Description of Artificial Sequence: Synthetic oligonucleotide
aagcuccugcuacuuccccagcucu

SEQ ID NO: 2405 - RNA, 25 nt, Artificial Sequence
  Description of Artificial Sequence: Synthetic oligonucleotide
ucaguaguuuaguacaauaaucucu

SEQ ID NO: 2406 - RNA, 25 nt, Artificial Sequence
  Description of Artificial Sequence: Synthetic oligonucleotide
uauuugagaaguucucagaauaacu

SEQ ID NO: 2407 - RNA, 25 nt, Artificial Sequence
  Description of Artificial Sequence: Synthetic oligonucleotide
uaccuccucacuuggcugucugacc

SEQ ID NO: 2408 - RNA, 25 nt, Artificial Sequence
  Description of Artificial Sequence: Synthetic oligonucleotide
cagagaaugcaccucuuguuacucc

SEQ ID NO: 2409 - RNA, 25 nt, Artificial Sequence
  Description of Artificial Sequence: Synthetic oligonucleotide
ccuguuauuuuucugcccuggguuc

SEQ ID NO: 2410 - RNA, 25 nt, Artificial Sequence
  Description of Artificial Sequence: Synthetic oligonucleotide
cuuccacagcacaaacacaccucaa

SEQ ID NO: 2411 - RNA, 25 nt, Artificial Sequence
  Description of Artificial Sequence: Synthetic oligonucleotide
acacaccucugccaccccagguuuu

SEQ ID NO: 2412 - RNA, 25 nt, Artificial Sequence
  Description of Artificial Sequence: Synthetic oligonucleotide
uucaucugaaaagcaguucaugucu

SEQ ID NO: 2413 - RNA, 25 nt, Artificial Sequence
  Description of Artificial Sequence: Synthetic oligonucleotide
ugaaacagagaaccaaaccgcaaac

SEQ ID NO: 2414 - RNA, 25 nt, Artificial Sequence
  Description of Artificial Sequence: Synthetic oligonucleotide
cgugaaauucuauugaaaacagugu

SEQ ID NO: 2415 - RNA, 25 nt, Artificial Sequence
  Description of Artificial Sequence: Synthetic oligonucleotide
ucuugagcucuaaaguagcaacugc

SEQ ID NO: 2416 - RNA, 25 nt, Artificial Sequence
  Description of Artificial Sequence: Synthetic oligonucleotide
cuguugaacuuagaacuaugccuaa

SEQ ID NO: 2417 - RNA, 25 nt, Artificial Sequence
  Description of Artificial Sequence: Synthetic oligonucleotide
auuuuuggagaaaugucauaaauua

SEQ ID NO: 2418 - RNA, 25 nt, Artificial Sequence
  Description of Artificial Sequence: Synthetic oligonucleotide
acuguuuugccaagaauauaguuau

SEQ ID NO: 2419 - RNA, 25 nt, Artificial Sequence
  Description of Artificial Sequence: Synthetic oligonucleotide
uuauugcuguuugguuuguuuauaa

SEQ ID NO: 2420 - RNA, 25 nt, Artificial Sequence
  Description of Artificial Sequence: Synthetic oligonucleotide
auguuaucggcucuauucucuaaac

SEQ ID NO: 2421 - RNA, 25 nt, Artificial Sequence
  Description of Artificial Sequence: Synthetic oligonucleotide
cuggcaucugcucuagauucauaaa

SEQ ID NO: 2422 - RNA, 25 nt, Artificial Sequence
  Description of Artificial Sequence: Synthetic oligonucleotide
auacaaaaaugaauacugaauuuug

SEQ ID NO: 2423 - RNA, 25 nt, Artificial Sequence
  Description of Artificial Sequence: Synthetic oligonucleotide
gagucuauccuagucuucacaacuu

SEQ ID NO: 2424 - RNA, 25 nt, Artificial Sequence
  Description of Artificial Sequence: Synthetic oligonucleotide
uugacguaauuaaauccaacuuuuc

SEQ ID NO: 2425 - RNA, 25 nt, Artificial Sequence
  Description of Artificial Sequence: Synthetic oligonucleotide
cacagugaagugccuuuuuccuaga

SEQ ID NO: 2426 - RNA, 25 nt, Artificial Sequence
  Description of Artificial Sequence: Synthetic oligonucleotide
aagugguuuguagacuccuuuauaa

SEQ ID NO: 2427 - RNA, 25 nt, Artificial Sequence
  Description of Artificial Sequence: Synthetic oligonucleotide
auauuucaguggaauagaugucuca

SEQ ID NO: 2428 - RNA, 25 nt, Artificial Sequence
  Description of Artificial Sequence: Synthetic oligonucleotide
aaaaauccuuaugcaugaaaugaau

SEQ ID NO: 2429 - RNA, 25 nt, Artificial Sequence
  Description of Artificial Sequence: Synthetic oligonucleotide
ugucugagauacgucugugacuuau

SEQ ID NO: 2430 - RNA, 25 nt, Artificial Sequence
  Description of Artificial Sequence: Synthetic oligonucleotide
ucuaccauugaaggaaagcuauauc

SEQ ID NO: 2431 - RNA, 25 nt, Artificial Sequence
  Description of Artificial Sequence: Synthetic oligonucleotide
cuauuugagagcagaugccauuuug

SEQ ID NO: 2432 - RNA, 25 nt, Artificial Sequence
  Description of Artificial Sequence: Synthetic oligonucleotide
guacauguaugaaauugguuuucca

SEQ ID NO: 2433 - RNA, 25 nt, Artificial Sequence
  Description of Artificial Sequence: Synthetic oligonucleotide
agaggccuguuuuggggcuuuccca

SEQ ID NO: 2434 - RNA, 25 nt, Artificial Sequence
  Description of Artificial Sequence: Synthetic oligonucleotide
aggagaaagaugaaacugaaagcau

SEQ ID NO: 2435 - RNA, 25 nt, Artificial Sequence
  Description of Artificial Sequence: Synthetic oligonucleotide
uaugaauaauuucacuuaauaauuu

SEQ ID NO: 2436 - RNA, 25 nt, Artificial Sequence
  Description of Artificial Sequence: Synthetic oligonucleotide
uuuaccuaaucuccacuuuuuucau

SEQ ID NO: 2437 - RNA, 25 nt, Artificial Sequence
  Description of Artificial Sequence: Synthetic oligonucleotide
uagguuacuaccuauacaauguaug

SEQ ID NO: 2438 - RNA, 25 nt, Artificial Sequence
  Description of Artificial Sequence: Synthetic oligonucleotide
guaauuuguuuccccuagcuuacug

SEQ ID NO: 2439 - RNA, 25 nt, Artificial Sequence
  Description of Artificial Sequence: Synthetic oligonucleotide
gauaaaccuaauauucaaugaacuu

SEQ ID NO: 2440 - RNA, 25 nt, Artificial Sequence
  Description of Artificial Sequence: Synthetic oligonucleotide
uccauuuguauucaaauuuguguca

SEQ ID NO: 2441 - RNA, 25 nt, Artificial Sequence
  Description of Artificial Sequence: Synthetic oligonucleotide
auaccagaaagcucuacauuugcag

SEQ ID NO: 2442 - RNA, 25 nt, Artificial Sequence
  Description of Artificial Sequence: Synthetic oligonucleotide
gauguucaaauauuguaaaacuuug

SEQ ID NO: 2443 - RNA, 25 nt, Artificial Sequence
  Description of Artificial Sequence: Synthetic oligonucleotide
ggugcauuguuauuuaauagcugug

SEQ ID NO: 2444 - RNA, 25 nt, Artificial Sequence
  Description of Artificial Sequence: Synthetic oligonucleotide
gaucagugauuuucaaaccucaaau

SEQ ID NO: 2445 - RNA, 25 nt, Artificial Sequence
  Description of Artificial Sequence: Synthetic oligonucleotide
cucaaauauaguauauuaacaaauu
